United States Patent Application Publication US 2026/0327574 A1, published October 22, 2026 (application 19/542,542).

The application's sequence listing, which the Patent Office published only in electronic form, follows.

SEQUENCE LISTING (175 sequences)

SEQ ID NO: 1 - protein, 3500 aa, synthetic construct
  REGION 1..3500: note = resilin-like polypeptide
  VARIANT 8..3500: note = May be present or absent in groups of the repeat unit Gly Arg GlyAsp Ser Pro Tyr
GRGDSPYGRGDSPYGRGDSPYGRGDSPYGRGDSPYGRGDSPYGRGDSPYGRGDSPYGRGDSPYGRGDSPYGRGDSPYGRGDSPYGRGDSPYGRGDSPYGRGDSPYGRGDSPYGRGDSPYGRGDSPYGRGDSPYGRGDSPYGRGDSPYGRGDSPYGRGDSPYGRGDSPYGRGDSPYGRGDSPYGRGDSPYGRGDSPYGRGDSPYGRGDSPYGRGDSPYGRGDSPYGRGDSPYGRGDSPYGRGDSPYGRGDSPYGRGDSPYGRGDSPYGRGDSPYGRGDSPYGRGDSPYGRGDSPYGRGDSPYGRGDSPYGRGDSPYGRGDSPYGRGDSPYGRGDSPYGRGDSPYGRGDSPYGRGDSPYGRGDSPYGRGDSPYGRGDSPYGRGDSPYGRGDSPYGRGDSPYGRGDSPYGRGDSPYGRGDSPYGRGDSPYGRGDSPYGRGDSPYGRGDSPYGRGDSPYGRGDSPYGRGDSPYGRGDSPYGRGDSPYGRGDSPYGRGDSPYGRGDSPYGRGDSPYGRGDSPYGRGDSPYGRGDSPYGRGDSPYGRGDSPYGRGDSPYGRGDSPYGRGDSPYGRGDSPYGRGDSPYGRGDSPYGRGDSPYGRGDSPYGRGDSPYGRGDSPYGRGDSPYGRGDSPYGRGDSPYGRGDSPYGRGDSPYGRGDSPYGRGDSPYGRGDSPYGRGDSPYGRGDSPYGRGDSPYGRGDSPYGRGDSPYGRGDSPYGRGDSPYGRGDSPYGRGDSPYGRGDSPYGRGDSPYGRGDSPYGRGDSPYGRGDSPYGRGDSPYGRGDSPYGRGDSPYGRGDSPYGRGDSPYGRGDSPYGRGDSPYGRGDSPYGRGDSPYGRGDSPYGRGDSPYGRGDSPYGRGDSPYGRGDSPYGRGDSPYGRGDSPYGRGDSPYGRGDSPYGRGDSPYGRGDSPYGRGDSPYGRGDSPYGRGDSPYGRGDSPYGRGDSPYGRGDSPYGRGDSPYGRGDSPYGRGDSPYGRGDSPYGRGDSPYGRGDSPYGRGDSPYGRGDSPYGRGDSPYGRGDSPYGRGDSPYGRGDSPYGRGDSPYGRGDSPYGRGDSPYGRGDSPYGRGDSPYGRGDSPYGRGDSPYGRGDSPYGRGDSPYGRGDSPYGRGDSPYGRGDSPYGRGDSPYGRGDSPYGRGDSPYGRGDSPYGRGDSPYGRGDSPYGRGDSPYGRGDSPYGRGDSPYGRGDSPYGRGDSPYGRGDSPYGRGDSPYGRGDSPYGRGDSPYGRGDSPYGRGDSPYGRGDSPYGRGDSPYGRGDSPYGRGDSPYGRGDSPYGRGDSPYGRGDSPYGRGDSPYGRGDSPYGRGDSPYGRGDSPYGRGDSPYGRGDSPYGRGDSPYGRGDSPYGRGDSPYGRGDSPYGRGDSPYGRGDSPYGRGDSPYGRGDSPYGRGDSPYGRGDSPYGRGDSPYGRGDSPYGRGDSPYGRGDSPYGRGDSPYGRGDSPYGRGDSPYGRGDSPYGRGDSPYGRGDSPYGRGDSPYGRGDSPYGRGDSPYGRGDSPYGRGDSPYGRGDSPYGRGDSPYGRGDSPYGRGDSPYGRGDSPYGRGDSPYGRGDSPYGRGDSPYGRGDSPYGRGDSPYGRGDSPYGRGDSPYGRGDSPYGRGDSPYGRGDSPYGRGDSPYGRGDSPYGRGDSPYGRGDSPYGRGDSPYGRGDSPYGRGDSPYGRGDSPYGRGDSPYGRGDSPYGRGDSPYGRGDSPYGRGDSPYGRGDSPYGRGDSPYGRGDSPYGRGDSPYGRGDSPYGRGDSPYGRGDSPYGRGDSPYGRGDSPYGRGDSPYGRGDSPYGRGDSPYGRGDSPYGRGDSPYGRGDSPYGRGDSPYGRGDSPYGRGDSPYGRGDSPYGRGDSPYGRGDSPYGRGDSPYGRGDSPYGRGDSPYGRGDSPYGRGDSPYGRGDSPYGRGDSPYGRGDSPYGRGDSPYGRGDSPYGRGDSPYGRGDSPYGRGDSPYGRGDSPYGRGDSPYGRGDSPYGRGDSPYGRGDSPYGRGDSPYGRGDSPYGRGDSPYGRGDSPYGRGDSPYGRGDSPYGRGDSPYGRGDSPYGRGDSPYGRGDSPYGRGDSPYGRGDSPYGRGDSPYGRGDSPYGRGDSPYGRGDSPYGRGDSPYGRGDSPYGRGDSPYGRGDSPYGRGDSPYGRGDSPYGRGDSPYGRGDSPYGRGDSPYGRGDSPYGRGDSPYGRGDSPYGRGDSPYGRGDSPYGRGDSPYGRGDSPYGRGDSPYGRGDSPYGRGDSPYGRGDSPYGRGDSPYGRGDSPYGRGDSPYGRGDSPYGRGDSPYGRGDSPYGRGDSPYGRGDSPYGRGDSPYGRGDSPYGRGDSPYGRGDSPYGRGDSPYGRGDSPYGRGDSPYGRGDSPYGRGDSPYGRGDSPYGRGDSPYGRGDSPYGRGDSPYGRGDSPYGRGDSPYGRGDSPYGRGDSPYGRGDSPYGRGDSPYGRGDSPYGRGDSPYGRGDSPYGRGDSPYGRGDSPYGRGDSPYGRGDSPYGRGDSPYGRGDSPYGRGDSPYGRGDSPYGRGDSPYGRGDSPYGRGDSPYGRGDSPYGRGDSPYGRGDSPYGRGDSPYGRGDSPYGRGDSPYGRGDSPYGRGDSPYGRGDSPYGRGDSPYGRGDSPYGRGDSPYGRGDSPYGRGDSPYGRGDSPYGRGDSPYGRGDSPYGRGDSPYGRGDSPYGRGDSPYGRGDSPYGRGDSPYGRGDSPYGRGDSPYGRGDSPYGRGDSPYGRGDSPYGRGDSPYGRGDSPYGRGDSPYGRGDSPYGRGDSPYGRGDSPYGRGDSPYGRGDSPYGRGDSPYGRGDSPYGRGDSPYGRGDSPYGRGDSPYGRGDSPYGRGDSPYGRGDSPYGRGDSPYGRGDSPYGRGDSPYGRGDSPYGRGDSPYGRGDSPYGRGDSPYGRGDSPYGRGDSPYGRGDSPYGRGDSPYGRGDSPYGRGDSPYGRGDSPYGRGDSPYGRGDSPYGRGDSPYGRGDSPYGRGDSPYGRGDSPYGRGDSPYGRGDSPYGRGDSPYGRGDSPYGRGDSPYGRGDSPYGRGDSPYGRGDSPYGRGDSPYGRGDSPYGRGDSPYGRGDSPYGRGDSPYGRGDSPYGRGDSPYGRGDSPYGRGDSPYGRGDSPYGRGDSPYGRGDSPYGRGDSPYGRGDSPYGRGDSPYGRGDSPYGRGDSPYGRGDSPYGRGDSPYGRGDSPYGRGDSPYGRGDSPYGRGDSPYGRGDSPYGRGDSPYGRGDSPYGRGDSPYGRGDSPYGRGDSPYGRGDSPYGRGDSPYGRGDSPYGRGDSPYGRGDSPYGRGDSPYGRGDSPYGRGDSPYGRGDSPYGRGDSPYGRGDSPYGRGDSPYGRGDSPYGRGDSPYGRGDSPYGRGDSPYGRGDSPYGRGDSPYGRGDSPYGRGDSPYGRGDSPYGRGDSPYGRGDSPYGRGDSPYGRGDSPYGRGDSPYGRGDSPYGRGDSPYGRGDSPYGRGDSPYGRGDSPYGRGDSPYGRGDSPYGRGDSPYGRGDSPYGRGDSPYGRGDSPYGRGDSPYGRGDSPYGRGDSPYGRGDSPY

SEQ ID NO: 2 - protein, 3500 aa, synthetic construct
  REGION 1..3500: note = resilin-like polypeptide
  VARIANT 8..3500: note = May be present or absent in groups of the repeat unit Gly Arg GlyAsp Ser Pro His
GRGDSPHGRGDSPHGRGDSPHGRGDSPHGRGDSPHGRGDSPHGRGDSPHGRGDSPHGRGDSPHGRGDSPHGRGDSPHGRGDSPHGRGDSPHGRGDSPHGRGDSPHGRGDSPHGRGDSPHGRGDSPHGRGDSPHGRGDSPHGRGDSPHGRGDSPHGRGDSPHGRGDSPHGRGDSPHGRGDSPHGRGDSPHGRGDSPHGRGDSPHGRGDSPHGRGDSPHGRGDSPHGRGDSPHGRGDSPHGRGDSPHGRGDSPHGRGDSPHGRGDSPHGRGDSPHGRGDSPHGRGDSPHGRGDSPHGRGDSPHGRGDSPHGRGDSPHGRGDSPHGRGDSPHGRGDSPHGRGDSPHGRGDSPHGRGDSPHGRGDSPHGRGDSPHGRGDSPHGRGDSPHGRGDSPHGRGDSPHGRGDSPHGRGDSPHGRGDSPHGRGDSPHGRGDSPHGRGDSPHGRGDSPHGRGDSPHGRGDSPHGRGDSPHGRGDSPHGRGDSPHGRGDSPHGRGDSPHGRGDSPHGRGDSPHGRGDSPHGRGDSPHGRGDSPHGRGDSPHGRGDSPHGRGDSPHGRGDSPHGRGDSPHGRGDSPHGRGDSPHGRGDSPHGRGDSPHGRGDSPHGRGDSPHGRGDSPHGRGDSPHGRGDSPHGRGDSPHGRGDSPHGRGDSPHGRGDSPHGRGDSPHGRGDSPHGRGDSPHGRGDSPHGRGDSPHGRGDSPHGRGDSPHGRGDSPHGRGDSPHGRGDSPHGRGDSPHGRGDSPHGRGDSPHGRGDSPHGRGDSPHGRGDSPHGRGDSPHGRGDSPHGRGDSPHGRGDSPHGRGDSPHGRGDSPHGRGDSPHGRGDSPHGRGDSPHGRGDSPHGRGDSPHGRGDSPHGRGDSPHGRGDSPHGRGDSPHGRGDSPHGRGDSPHGRGDSPHGRGDSPHGRGDSPHGRGDSPHGRGDSPHGRGDSPHGRGDSPHGRGDSPHGRGDSPHGRGDSPHGRGDSPHGRGDSPHGRGDSPHGRGDSPHGRGDSPHGRGDSPHGRGDSPHGRGDSPHGRGDSPHGRGDSPHGRGDSPHGRGDSPHGRGDSPHGRGDSPHGRGDSPHGRGDSPHGRGDSPHGRGDSPHGRGDSPHGRGDSPHGRGDSPHGRGDSPHGRGDSPHGRGDSPHGRGDSPHGRGDSPHGRGDSPHGRGDSPHGRGDSPHGRGDSPHGRGDSPHGRGDSPHGRGDSPHGRGDSPHGRGDSPHGRGDSPHGRGDSPHGRGDSPHGRGDSPHGRGDSPHGRGDSPHGRGDSPHGRGDSPHGRGDSPHGRGDSPHGRGDSPHGRGDSPHGRGDSPHGRGDSPHGRGDSPHGRGDSPHGRGDSPHGRGDSPHGRGDSPHGRGDSPHGRGDSPHGRGDSPHGRGDSPHGRGDSPHGRGDSPHGRGDSPHGRGDSPHGRGDSPHGRGDSPHGRGDSPHGRGDSPHGRGDSPHGRGDSPHGRGDSPHGRGDSPHGRGDSPHGRGDSPHGRGDSPHGRGDSPHGRGDSPHGRGDSPHGRGDSPHGRGDSPHGRGDSPHGRGDSPHGRGDSPHGRGDSPHGRGDSPHGRGDSPHGRGDSPHGRGDSPHGRGDSPHGRGDSPHGRGDSPHGRGDSPHGRGDSPHGRGDSPHGRGDSPHGRGDSPHGRGDSPHGRGDSPHGRGDSPHGRGDSPHGRGDSPHGRGDSPHGRGDSPHGRGDSPHGRGDSPHGRGDSPHGRGDSPHGRGDSPHGRGDSPHGRGDSPHGRGDSPHGRGDSPHGRGDSPHGRGDSPHGRGDSPHGRGDSPHGRGDSPHGRGDSPHGRGDSPHGRGDSPHGRGDSPHGRGDSPHGRGDSPHGRGDSPHGRGDSPHGRGDSPHGRGDSPHGRGDSPHGRGDSPHGRGDSPHGRGDSPHGRGDSPHGRGDSPHGRGDSPHGRGDSPHGRGDSPHGRGDSPHGRGDSPHGRGDSPHGRGDSPHGRGDSPHGRGDSPHGRGDSPHGRGDSPHGRGDSPHGRGDSPHGRGDSPHGRGDSPHGRGDSPHGRGDSPHGRGDSPHGRGDSPHGRGDSPHGRGDSPHGRGDSPHGRGDSPHGRGDSPHGRGDSPHGRGDSPHGRGDSPHGRGDSPHGRGDSPHGRGDSPHGRGDSPHGRGDSPHGRGDSPHGRGDSPHGRGDSPHGRGDSPHGRGDSPHGRGDSPHGRGDSPHGRGDSPHGRGDSPHGRGDSPHGRGDSPHGRGDSPHGRGDSPHGRGDSPHGRGDSPHGRGDSPHGRGDSPHGRGDSPHGRGDSPHGRGDSPHGRGDSPHGRGDSPHGRGDSPHGRGDSPHGRGDSPHGRGDSPHGRGDSPHGRGDSPHGRGDSPHGRGDSPHGRGDSPHGRGDSPHGRGDSPHGRGDSPHGRGDSPHGRGDSPHGRGDSPHGRGDSPHGRGDSPHGRGDSPHGRGDSPHGRGDSPHGRGDSPHGRGDSPHGRGDSPHGRGDSPHGRGDSPHGRGDSPHGRGDSPHGRGDSPHGRGDSPHGRGDSPHGRGDSPHGRGDSPHGRGDSPHGRGDSPHGRGDSPHGRGDSPHGRGDSPHGRGDSPHGRGDSPHGRGDSPHGRGDSPHGRGDSPHGRGDSPHGRGDSPHGRGDSPHGRGDSPHGRGDSPHGRGDSPHGRGDSPHGRGDSPHGRGDSPHGRGDSPHGRGDSPHGRGDSPHGRGDSPHGRGDSPHGRGDSPHGRGDSPHGRGDSPHGRGDSPHGRGDSPHGRGDSPHGRGDSPHGRGDSPHGRGDSPHGRGDSPHGRGDSPHGRGDSPHGRGDSPHGRGDSPHGRGDSPHGRGDSPHGRGDSPHGRGDSPHGRGDSPHGRGDSPHGRGDSPHGRGDSPHGRGDSPHGRGDSPHGRGDSPHGRGDSPHGRGDSPHGRGDSPHGRGDSPHGRGDSPHGRGDSPHGRGDSPHGRGDSPHGRGDSPHGRGDSPHGRGDSPHGRGDSPHGRGDSPHGRGDSPHGRGDSPHGRGDSPHGRGDSPHGRGDSPHGRGDSPHGRGDSPHGRGDSPHGRGDSPHGRGDSPHGRGDSPHGRGDSPHGRGDSPHGRGDSPHGRGDSPHGRGDSPHGRGDSPHGRGDSPHGRGDSPHGRGDSPHGRGDSPHGRGDSPHGRGDSPHGRGDSPHGRGDSPHGRGDSPHGRGDSPHGRGDSPHGRGDSPHGRGDSPHGRGDSPHGRGDSPHGRGDSPHGRGDSPHGRGDSPHGRGDSPHGRGDSPHGRGDSPHGRGDSPHGRGDSPHGRGDSPHGRGDSPHGRGDSPHGRGDSPHGRGDSPHGRGDSPHGRGDSPHGRGDSPHGRGDSPHGRGDSPHGRGDSPHGRGDSPHGRGDSPHGRGDSPHGRGDSPHGRGDSPHGRGDSPHGRGDSPHGRGDSPHGRGDSPHGRGDSPHGRGDSPHGRGDSPHGRGDSPHGRGDSPHGRGDSPHGRGDSPHGRGDSPHGRGDSPHGRGDSPHGRGDSPHGRGDSPHGRGDSPHGRGDSPHGRGDSPHGRGDSPHGRGDSPHGRGDSPHGRGDSPHGRGDSPHGRGDSPHGRGDSPHGRGDSPHGRGDSPH

SEQ ID NO: 3 - protein, 3500 aa, synthetic construct
  REGION 1..3500: note = resilin-like polypeptide
  VARIANT 8..3500: note = May be present or absent in groups of the repeat unit Gly Arg GlyAsp Ser Pro Val
GRGDSPVGRGDSPVGRGDSPVGRGDSPVGRGDSPVGRGDSPVGRGDSPVGRGDSPVGRGDSPVGRGDSPVGRGDSPVGRGDSPVGRGDSPVGRGDSPVGRGDSPVGRGDSPVGRGDSPVGRGDSPVGRGDSPVGRGDSPVGRGDSPVGRGDSPVGRGDSPVGRGDSPVGRGDSPVGRGDSPVGRGDSPVGRGDSPVGRGDSPVGRGDSPVGRGDSPVGRGDSPVGRGDSPVGRGDSPVGRGDSPVGRGDSPVGRGDSPVGRGDSPVGRGDSPVGRGDSPVGRGDSPVGRGDSPVGRGDSPVGRGDSPVGRGDSPVGRGDSPVGRGDSPVGRGDSPVGRGDSPVGRGDSPVGRGDSPVGRGDSPVGRGDSPVGRGDSPVGRGDSPVGRGDSPVGRGDSPVGRGDSPVGRGDSPVGRGDSPVGRGDSPVGRGDSPVGRGDSPVGRGDSPVGRGDSPVGRGDSPVGRGDSPVGRGDSPVGRGDSPVGRGDSPVGRGDSPVGRGDSPVGRGDSPVGRGDSPVGRGDSPVGRGDSPVGRGDSPVGRGDSPVGRGDSPVGRGDSPVGRGDSPVGRGDSPVGRGDSPVGRGDSPVGRGDSPVGRGDSPVGRGDSPVGRGDSPVGRGDSPVGRGDSPVGRGDSPVGRGDSPVGRGDSPVGRGDSPVGRGDSPVGRGDSPVGRGDSPVGRGDSPVGRGDSPVGRGDSPVGRGDSPVGRGDSPVGRGDSPVGRGDSPVGRGDSPVGRGDSPVGRGDSPVGRGDSPVGRGDSPVGRGDSPVGRGDSPVGRGDSPVGRGDSPVGRGDSPVGRGDSPVGRGDSPVGRGDSPVGRGDSPVGRGDSPVGRGDSPVGRGDSPVGRGDSPVGRGDSPVGRGDSPVGRGDSPVGRGDSPVGRGDSPVGRGDSPVGRGDSPVGRGDSPVGRGDSPVGRGDSPVGRGDSPVGRGDSPVGRGDSPVGRGDSPVGRGDSPVGRGDSPVGRGDSPVGRGDSPVGRGDSPVGRGDSPVGRGDSPVGRGDSPVGRGDSPVGRGDSPVGRGDSPVGRGDSPVGRGDSPVGRGDSPVGRGDSPVGRGDSPVGRGDSPVGRGDSPVGRGDSPVGRGDSPVGRGDSPVGRGDSPVGRGDSPVGRGDSPVGRGDSPVGRGDSPVGRGDSPVGRGDSPVGRGDSPVGRGDSPVGRGDSPVGRGDSPVGRGDSPVGRGDSPVGRGDSPVGRGDSPVGRGDSPVGRGDSPVGRGDSPVGRGDSPVGRGDSPVGRGDSPVGRGDSPVGRGDSPVGRGDSPVGRGDSPVGRGDSPVGRGDSPVGRGDSPVGRGDSPVGRGDSPVGRGDSPVGRGDSPVGRGDSPVGRGDSPVGRGDSPVGRGDSPVGRGDSPVGRGDSPVGRGDSPVGRGDSPVGRGDSPVGRGDSPVGRGDSPVGRGDSPVGRGDSPVGRGDSPVGRGDSPVGRGDSPVGRGDSPVGRGDSPVGRGDSPVGRGDSPVGRGDSPVGRGDSPVGRGDSPVGRGDSPVGRGDSPVGRGDSPVGRGDSPVGRGDSPVGRGDSPVGRGDSPVGRGDSPVGRGDSPVGRGDSPVGRGDSPVGRGDSPVGRGDSPVGRGDSPVGRGDSPVGRGDSPVGRGDSPVGRGDSPVGRGDSPVGRGDSPVGRGDSPVGRGDSPVGRGDSPVGRGDSPVGRGDSPVGRGDSPVGRGDSPVGRGDSPVGRGDSPVGRGDSPVGRGDSPVGRGDSPVGRGDSPVGRGDSPVGRGDSPVGRGDSPVGRGDSPVGRGDSPVGRGDSPVGRGDSPVGRGDSPVGRGDSPVGRGDSPVGRGDSPVGRGDSPVGRGDSPVGRGDSPVGRGDSPVGRGDSPVGRGDSPVGRGDSPVGRGDSPVGRGDSPVGRGDSPVGRGDSPVGRGDSPVGRGDSPVGRGDSPVGRGDSPVGRGDSPVGRGDSPVGRGDSPVGRGDSPVGRGDSPVGRGDSPVGRGDSPVGRGDSPVGRGDSPVGRGDSPVGRGDSPVGRGDSPVGRGDSPVGRGDSPVGRGDSPVGRGDSPVGRGDSPVGRGDSPVGRGDSPVGRGDSPVGRGDSPVGRGDSPVGRGDSPVGRGDSPVGRGDSPVGRGDSPVGRGDSPVGRGDSPVGRGDSPVGRGDSPVGRGDSPVGRGDSPVGRGDSPVGRGDSPVGRGDSPVGRGDSPVGRGDSPVGRGDSPVGRGDSPVGRGDSPVGRGDSPVGRGDSPVGRGDSPVGRGDSPVGRGDSPVGRGDSPVGRGDSPVGRGDSPVGRGDSPVGRGDSPVGRGDSPVGRGDSPVGRGDSPVGRGDSPVGRGDSPVGRGDSPVGRGDSPVGRGDSPVGRGDSPVGRGDSPVGRGDSPVGRGDSPVGRGDSPVGRGDSPVGRGDSPVGRGDSPVGRGDSPVGRGDSPVGRGDSPVGRGDSPVGRGDSPVGRGDSPVGRGDSPVGRGDSPVGRGDSPVGRGDSPVGRGDSPVGRGDSPVGRGDSPVGRGDSPVGRGDSPVGRGDSPVGRGDSPVGRGDSPVGRGDSPVGRGDSPVGRGDSPVGRGDSPVGRGDSPVGRGDSPVGRGDSPVGRGDSPVGRGDSPVGRGDSPVGRGDSPVGRGDSPVGRGDSPVGRGDSPVGRGDSPVGRGDSPVGRGDSPVGRGDSPVGRGDSPVGRGDSPVGRGDSPVGRGDSPVGRGDSPVGRGDSPVGRGDSPVGRGDSPVGRGDSPVGRGDSPVGRGDSPVGRGDSPVGRGDSPVGRGDSPVGRGDSPVGRGDSPVGRGDSPVGRGDSPVGRGDSPVGRGDSPVGRGDSPVGRGDSPVGRGDSPVGRGDSPVGRGDSPVGRGDSPVGRGDSPVGRGDSPVGRGDSPVGRGDSPVGRGDSPVGRGDSPVGRGDSPVGRGDSPVGRGDSPVGRGDSPVGRGDSPVGRGDSPVGRGDSPVGRGDSPVGRGDSPVGRGDSPVGRGDSPVGRGDSPVGRGDSPVGRGDSPVGRGDSPVGRGDSPVGRGDSPVGRGDSPVGRGDSPVGRGDSPVGRGDSPVGRGDSPVGRGDSPVGRGDSPVGRGDSPVGRGDSPVGRGDSPVGRGDSPVGRGDSPVGRGDSPVGRGDSPVGRGDSPVGRGDSPVGRGDSPVGRGDSPVGRGDSPVGRGDSPVGRGDSPVGRGDSPVGRGDSPVGRGDSPVGRGDSPVGRGDSPVGRGDSPVGRGDSPVGRGDSPVGRGDSPVGRGDSPVGRGDSPVGRGDSPVGRGDSPVGRGDSPVGRGDSPVGRGDSPVGRGDSPVGRGDSPVGRGDSPVGRGDSPVGRGDSPVGRGDSPVGRGDSPVGRGDSPVGRGDSPVGRGDSPVGRGDSPVGRGDSPVGRGDSPVGRGDSPVGRGDSPVGRGDSPVGRGDSPVGRGDSPVGRGDSPVGRGDSPVGRGDSPVGRGDSPVGRGDSPVGRGDSPVGRGDSPVGRGDSPVGRGDSPVGRGDSPVGRGDSPVGRGDSPVGRGDSPVGRGDSPVGRGDSPVGRGDSPVGRGDSPVGRGDSPVGRGDSPVGRGDSPVGRGDSPVGRGDSPVGRGDSPV

SEQ ID NO: 4 - protein, 4000 aa, synthetic construct
  REGION 1..4000: note = resilin-like polypeptide
  VARIANT 9..4000: note = May be present or absent in groups of the repeat unit Gly Arg GlyAsp Ser Pro Tyr Gly
GRGDSPYGGRGDSPYGGRGDSPYGGRGDSPYGGRGDSPYGGRGDSPYGGRGDSPYGGRGDSPYGGRGDSPYGGRGDSPYGGRGDSPYGGRGDSPYGGRGDSPYGGRGDSPYGGRGDSPYGGRGDSPYGGRGDSPYGGRGDSPYGGRGDSPYGGRGDSPYGGRGDSPYGGRGDSPYGGRGDSPYGGRGDSPYGGRGDSPYGGRGDSPYGGRGDSPYGGRGDSPYGGRGDSPYGGRGDSPYGGRGDSPYGGRGDSPYGGRGDSPYGGRGDSPYGGRGDSPYGGRGDSPYGGRGDSPYGGRGDSPYGGRGDSPYGGRGDSPYGGRGDSPYGGRGDSPYGGRGDSPYGGRGDSPYGGRGDSPYGGRGDSPYGGRGDSPYGGRGDSPYGGRGDSPYGGRGDSPYGGRGDSPYGGRGDSPYGGRGDSPYGGRGDSPYGGRGDSPYGGRGDSPYGGRGDSPYGGRGDSPYGGRGDSPYGGRGDSPYGGRGDSPYGGRGDSPYGGRGDSPYGGRGDSPYGGRGDSPYGGRGDSPYGGRGDSPYGGRGDSPYGGRGDSPYGGRGDSPYGGRGDSPYGGRGDSPYGGRGDSPYGGRGDSPYGGRGDSPYGGRGDSPYGGRGDSPYGGRGDSPYGGRGDSPYGGRGDSPYGGRGDSPYGGRGDSPYGGRGDSPYGGRGDSPYGGRGDSPYGGRGDSPYGGRGDSPYGGRGDSPYGGRGDSPYGGRGDSPYGGRGDSPYGGRGDSPYGGRGDSPYGGRGDSPYGGRGDSPYGGRGDSPYGGRGDSPYGGRGDSPYGGRGDSPYGGRGDSPYGGRGDSPYGGRGDSPYGGRGDSPYGGRGDSPYGGRGDSPYGGRGDSPYGGRGDSPYGGRGDSPYGGRGDSPYGGRGDSPYGGRGDSPYGGRGDSPYGGRGDSPYGGRGDSPYGGRGDSPYGGRGDSPYGGRGDSPYGGRGDSPYGGRGDSPYGGRGDSPYGGRGDSPYGGRGDSPYGGRGDSPYGGRGDSPYGGRGDSPYGGRGDSPYGGRGDSPYGGRGDSPYGGRGDSPYGGRGDSPYGGRGDSPYGGRGDSPYGGRGDSPYGGRGDSPYGGRGDSPYGGRGDSPYGGRGDSPYGGRGDSPYGGRGDSPYGGRGDSPYGGRGDSPYGGRGDSPYGGRGDSPYGGRGDSPYGGRGDSPYGGRGDSPYGGRGDSPYGGRGDSPYGGRGDSPYGGRGDSPYGGRGDSPYGGRGDSPYGGRGDSPYGGRGDSPYGGRGDSPYGGRGDSPYGGRGDSPYGGRGDSPYGGRGDSPYGGRGDSPYGGRGDSPYGGRGDSPYGGRGDSPYGGRGDSPYGGRGDSPYGGRGDSPYGGRGDSPYGGRGDSPYGGRGDSPYGGRGDSPYGGRGDSPYGGRGDSPYGGRGDSPYGGRGDSPYGGRGDSPYGGRGDSPYGGRGDSPYGGRGDSPYGGRGDSPYGGRGDSPYGGRGDSPYGGRGDSPYGGRGDSPYGGRGDSPYGGRGDSPYGGRGDSPYGGRGDSPYGGRGDSPYGGRGDSPYGGRGDSPYGGRGDSPYGGRGDSPYGGRGDSPYGGRGDSPYGGRGDSPYGGRGDSPYGGRGDSPYGGRGDSPYGGRGDSPYGGRGDSPYGGRGDSPYGGRGDSPYGGRGDSPYGGRGDSPYGGRGDSPYGGRGDSPYGGRGDSPYGGRGDSPYGGRGDSPYGGRGDSPYGGRGDSPYGGRGDSPYGGRGDSPYGGRGDSPYGGRGDSPYGGRGDSPYGGRGDSPYGGRGDSPYGGRGDSPYGGRGDSPYGGRGDSPYGGRGDSPYGGRGDSPYGGRGDSPYGGRGDSPYGGRGDSPYGGRGDSPYGGRGDSPYGGRGDSPYGGRGDSPYGGRGDSPYGGRGDSPYGGRGDSPYGGRGDSPYGGRGDSPYGGRGDSPYGGRGDSPYGGRGDSPYGGRGDSPYGGRGDSPYGGRGDSPYGGRGDSPYGGRGDSPYGGRGDSPYGGRGDSPYGGRGDSPYGGRGDSPYGGRGDSPYGGRGDSPYGGRGDSPYGGRGDSPYGGRGDSPYGGRGDSPYGGRGDSPYGGRGDSPYGGRGDSPYGGRGDSPYGGRGDSPYGGRGDSPYGGRGDSPYGGRGDSPYGGRGDSPYGGRGDSPYGGRGDSPYGGRGDSPYGGRGDSPYGGRGDSPYGGRGDSPYGGRGDSPYGGRGDSPYGGRGDSPYGGRGDSPYGGRGDSPYGGRGDSPYGGRGDSPYGGRGDSPYGGRGDSPYGGRGDSPYGGRGDSPYGGRGDSPYGGRGDSPYGGRGDSPYGGRGDSPYGGRGDSPYGGRGDSPYGGRGDSPYGGRGDSPYGGRGDSPYGGRGDSPYGGRGDSPYGGRGDSPYGGRGDSPYGGRGDSPYGGRGDSPYGGRGDSPYGGRGDSPYGGRGDSPYGGRGDSPYGGRGDSPYGGRGDSPYGGRGDSPYGGRGDSPYGGRGDSPYGGRGDSPYGGRGDSPYGGRGDSPYGGRGDSPYGGRGDSPYGGRGDSPYGGRGDSPYGGRGDSPYGGRGDSPYGGRGDSPYGGRGDSPYGGRGDSPYGGRGDSPYGGRGDSPYGGRGDSPYGGRGDSPYGGRGDSPYGGRGDSPYGGRGDSPYGGRGDSPYGGRGDSPYGGRGDSPYGGRGDSPYGGRGDSPYGGRGDSPYGGRGDSPYGGRGDSPYGGRGDSPYGGRGDSPYGGRGDSPYGGRGDSPYGGRGDSPYGGRGDSPYGGRGDSPYGGRGDSPYGGRGDSPYGGRGDSPYGGRGDSPYGGRGDSPYGGRGDSPYGGRGDSPYGGRGDSPYGGRGDSPYGGRGDSPYGGRGDSPYGGRGDSPYGGRGDSPYGGRGDSPYGGRGDSPYGGRGDSPYGGRGDSPYGGRGDSPYGGRGDSPYGGRGDSPYGGRGDSPYGGRGDSPYGGRGDSPYGGRGDSPYGGRGDSPYGGRGDSPYGGRGDSPYGGRGDSPYGGRGDSPYGGRGDSPYGGRGDSPYGGRGDSPYGGRGDSPYGGRGDSPYGGRGDSPYGGRGDSPYGGRGDSPYGGRGDSPYGGRGDSPYGGRGDSPYGGRGDSPYGGRGDSPYGGRGDSPYGGRGDSPYGGRGDSPYGGRGDSPYGGRGDSPYGGRGDSPYGGRGDSPYGGRGDSPYGGRGDSPYGGRGDSPYGGRGDSPYGGRGDSPYGGRGDSPYGGRGDSPYGGRGDSPYGGRGDSPYGGRGDSPYGGRGDSPYGGRGDSPYGGRGDSPYGGRGDSPYGGRGDSPYGGRGDSPYGGRGDSPYGGRGDSPYGGRGDSPYGGRGDSPYGGRGDSPYGGRGDSPYGGRGDSPYGGRGDSPYGGRGDSPYGGRGDSPYGGRGDSPYGGRGDSPYGGRGDSPYGGRGDSPYGGRGDSPYGGRGDSPYGGRGDSPYGGRGDSPYGGRGDSPYGGRGDSPYGGRGDSPYGGRGDSPYGGRGDSPYGGRGDSPYGGRGDSPYGGRGDSPYGGRGDSPYGGRGDSPYGGRGDSPYGGRGDSPYGGRGDSPYGGRGDSPYGGRGDSPYGGRGDSPYGGRGDSPYGGRGDSPYGGRGDSPYGGRGDSPYGGRGDSPYGGRGDSPYGGRGDSPYGGRGDSPYGGRGDSPYGGRGDSPYGGRGDSPYGGRGDSPYGGRGDSPYGGRGDSPYGGRGDSPYGGRGDSPYGGRGDSPYGGRGDSPYGGRGDSPYGGRGDSPYGGRGDSPYGGRGDSPYGGRGDSPYGGRGDSPYGGRGDSPYGGRGDSPYGGRGDSPYGGRGDSPYGGRGDSPYGGRGDSPYGGRGDSPYGGRGDSPYGGRGDSPYGGRGDSPYGGRGDSPYGGRGDSPYGGRGDSPYGGRGDSPYGGRGDSPYGGRGDSPYGGRGDSPYGGRGDSPYGGRGDSPYGGRGDSPYGGRGDSPYGGRGDSPYGGRGDSPYGGRGDSPYGGRGDSPYGGRGDSPYGGRGDSPYGGRGDSPYGGRGDSPYGGRGDSPYGGRGDSPYGGRGDSPYGGRGDSPYGGRGDSPYGGRGDSPYGGRGDSPYGGRGDSPYGGRGDSPYGGRGDSPYGGRGDSPYG

SEQ ID NO: 5 - protein, 3500 aa, synthetic construct
  REGION 1..3500: note = resilin-like polypeptide
  VARIANT 8..3500: note = May be present or absent in groups of the repeat unit Arg Pro LeuGly Tyr Asp Ser
RPLGYDSRPLGYDSRPLGYDSRPLGYDSRPLGYDSRPLGYDSRPLGYDSRPLGYDSRPLGYDSRPLGYDSRPLGYDSRPLGYDSRPLGYDSRPLGYDSRPLGYDSRPLGYDSRPLGYDSRPLGYDSRPLGYDSRPLGYDSRPLGYDSRPLGYDSRPLGYDSRPLGYDSRPLGYDSRPLGYDSRPLGYDSRPLGYDSRPLGYDSRPLGYDSRPLGYDSRPLGYDSRPLGYDSRPLGYDSRPLGYDSRPLGYDSRPLGYDSRPLGYDSRPLGYDSRPLGYDSRPLGYDSRPLGYDSRPLGYDSRPLGYDSRPLGYDSRPLGYDSRPLGYDSRPLGYDSRPLGYDSRPLGYDSRPLGYDSRPLGYDSRPLGYDSRPLGYDSRPLGYDSRPLGYDSRPLGYDSRPLGYDSRPLGYDSRPLGYDSRPLGYDSRPLGYDSRPLGYDSRPLGYDSRPLGYDSRPLGYDSRPLGYDSRPLGYDSRPLGYDSRPLGYDSRPLGYDSRPLGYDSRPLGYDSRPLGYDSRPLGYDSRPLGYDSRPLGYDSRPLGYDSRPLGYDSRPLGYDSRPLGYDSRPLGYDSRPLGYDSRPLGYDSRPLGYDSRPLGYDSRPLGYDSRPLGYDSRPLGYDSRPLGYDSRPLGYDSRPLGYDSRPLGYDSRPLGYDSRPLGYDSRPLGYDSRPLGYDSRPLGYDSRPLGYDSRPLGYDSRPLGYDSRPLGYDSRPLGYDSRPLGYDSRPLGYDSRPLGYDSRPLGYDSRPLGYDSRPLGYDSRPLGYDSRPLGYDSRPLGYDSRPLGYDSRPLGYDSRPLGYDSRPLGYDSRPLGYDSRPLGYDSRPLGYDSRPLGYDSRPLGYDSRPLGYDSRPLGYDSRPLGYDSRPLGYDSRPLGYDSRPLGYDSRPLGYDSRPLGYDSRPLGYDSRPLGYDSRPLGYDSRPLGYDSRPLGYDSRPLGYDSRPLGYDSRPLGYDSRPLGYDSRPLGYDSRPLGYDSRPLGYDSRPLGYDSRPLGYDSRPLGYDSRPLGYDSRPLGYDSRPLGYDSRPLGYDSRPLGYDSRPLGYDSRPLGYDSRPLGYDSRPLGYDSRPLGYDSRPLGYDSRPLGYDSRPLGYDSRPLGYDSRPLGYDSRPLGYDSRPLGYDSRPLGYDSRPLGYDSRPLGYDSRPLGYDSRPLGYDSRPLGYDSRPLGYDSRPLGYDSRPLGYDSRPLGYDSRPLGYDSRPLGYDSRPLGYDSRPLGYDSRPLGYDSRPLGYDSRPLGYDSRPLGYDSRPLGYDSRPLGYDSRPLGYDSRPLGYDSRPLGYDSRPLGYDSRPLGYDSRPLGYDSRPLGYDSRPLGYDSRPLGYDSRPLGYDSRPLGYDSRPLGYDSRPLGYDSRPLGYDSRPLGYDSRPLGYDSRPLGYDSRPLGYDSRPLGYDSRPLGYDSRPLGYDSRPLGYDSRPLGYDSRPLGYDSRPLGYDSRPLGYDSRPLGYDSRPLGYDSRPLGYDSRPLGYDSRPLGYDSRPLGYDSRPLGYDSRPLGYDSRPLGYDSRPLGYDSRPLGYDSRPLGYDSRPLGYDSRPLGYDSRPLGYDSRPLGYDSRPLGYDSRPLGYDSRPLGYDSRPLGYDSRPLGYDSRPLGYDSRPLGYDSRPLGYDSRPLGYDSRPLGYDSRPLGYDSRPLGYDSRPLGYDSRPLGYDSRPLGYDSRPLGYDSRPLGYDSRPLGYDSRPLGYDSRPLGYDSRPLGYDSRPLGYDSRPLGYDSRPLGYDSRPLGYDSRPLGYDSRPLGYDSRPLGYDSRPLGYDSRPLGYDSRPLGYDSRPLGYDSRPLGYDSRPLGYDSRPLGYDSRPLGYDSRPLGYDSRPLGYDSRPLGYDSRPLGYDSRPLGYDSRPLGYDSRPLGYDSRPLGYDSRPLGYDSRPLGYDSRPLGYDSRPLGYDSRPLGYDSRPLGYDSRPLGYDSRPLGYDSRPLGYDSRPLGYDSRPLGYDSRPLGYDSRPLGYDSRPLGYDSRPLGYDSRPLGYDSRPLGYDSRPLGYDSRPLGYDSRPLGYDSRPLGYDSRPLGYDSRPLGYDSRPLGYDSRPLGYDSRPLGYDSRPLGYDSRPLGYDSRPLGYDSRPLGYDSRPLGYDSRPLGYDSRPLGYDSRPLGYDSRPLGYDSRPLGYDSRPLGYDSRPLGYDSRPLGYDSRPLGYDSRPLGYDSRPLGYDSRPLGYDSRPLGYDSRPLGYDSRPLGYDSRPLGYDSRPLGYDSRPLGYDSRPLGYDSRPLGYDSRPLGYDSRPLGYDSRPLGYDSRPLGYDSRPLGYDSRPLGYDSRPLGYDSRPLGYDSRPLGYDSRPLGYDSRPLGYDSRPLGYDSRPLGYDSRPLGYDSRPLGYDSRPLGYDSRPLGYDSRPLGYDSRPLGYDSRPLGYDSRPLGYDSRPLGYDSRPLGYDSRPLGYDSRPLGYDSRPLGYDSRPLGYDSRPLGYDSRPLGYDSRPLGYDSRPLGYDSRPLGYDSRPLGYDSRPLGYDSRPLGYDSRPLGYDSRPLGYDSRPLGYDSRPLGYDSRPLGYDSRPLGYDSRPLGYDSRPLGYDSRPLGYDSRPLGYDSRPLGYDSRPLGYDSRPLGYDSRPLGYDSRPLGYDSRPLGYDSRPLGYDSRPLGYDSRPLGYDSRPLGYDSRPLGYDSRPLGYDSRPLGYDSRPLGYDSRPLGYDSRPLGYDSRPLGYDSRPLGYDSRPLGYDSRPLGYDSRPLGYDSRPLGYDSRPLGYDSRPLGYDSRPLGYDSRPLGYDSRPLGYDSRPLGYDSRPLGYDSRPLGYDSRPLGYDSRPLGYDSRPLGYDSRPLGYDSRPLGYDSRPLGYDSRPLGYDSRPLGYDSRPLGYDSRPLGYDSRPLGYDSRPLGYDSRPLGYDSRPLGYDSRPLGYDSRPLGYDSRPLGYDSRPLGYDSRPLGYDSRPLGYDSRPLGYDSRPLGYDSRPLGYDSRPLGYDSRPLGYDSRPLGYDSRPLGYDSRPLGYDSRPLGYDSRPLGYDSRPLGYDSRPLGYDSRPLGYDSRPLGYDSRPLGYDSRPLGYDSRPLGYDSRPLGYDSRPLGYDSRPLGYDSRPLGYDSRPLGYDSRPLGYDSRPLGYDSRPLGYDSRPLGYDSRPLGYDSRPLGYDSRPLGYDSRPLGYDSRPLGYDSRPLGYDSRPLGYDSRPLGYDSRPLGYDSRPLGYDSRPLGYDSRPLGYDSRPLGYDSRPLGYDSRPLGYDSRPLGYDSRPLGYDSRPLGYDSRPLGYDSRPLGYDSRPLGYDSRPLGYDSRPLGYDSRPLGYDSRPLGYDSRPLGYDSRPLGYDSRPLGYDSRPLGYDSRPLGYDSRPLGYDSRPLGYDSRPLGYDSRPLGYDSRPLGYDSRPLGYDSRPLGYDSRPLGYDSRPLGYDSRPLGYDSRPLGYDSRPLGYDSRPLGYDSRPLGYDSRPLGYDSRPLGYDSRPLGYDSRPLGYDSRPLGYDSRPLGYDSRPLGYDSRPLGYDSRPLGYDSRPLGYDSRPLGYDSRPLGYDSRPLGYDSRPLGYDSRPLGYDSRPLGYDSRPLGYDS

SEQ ID NO: 6 - protein, 3500 aa, synthetic construct
  REGION 1..3500: note = resilin-like polypeptide
  VARIANT 8..3500: note = May be present or absent in groups of the repeat unit Arg Pro AlaGly Tyr Asp Ser
RPAGYDSRPAGYDSRPAGYDSRPAGYDSRPAGYDSRPAGYDSRPAGYDSRPAGYDSRPAGYDSRPAGYDSRPAGYDSRPAGYDSRPAGYDSRPAGYDSRPAGYDSRPAGYDSRPAGYDSRPAGYDSRPAGYDSRPAGYDSRPAGYDSRPAGYDSRPAGYDSRPAGYDSRPAGYDSRPAGYDSRPAGYDSRPAGYDSRPAGYDSRPAGYDSRPAGYDSRPAGYDSRPAGYDSRPAGYDSRPAGYDSRPAGYDSRPAGYDSRPAGYDSRPAGYDSRPAGYDSRPAGYDSRPAGYDSRPAGYDSRPAGYDSRPAGYDSRPAGYDSRPAGYDSRPAGYDSRPAGYDSRPAGYDSRPAGYDSRPAGYDSRPAGYDSRPAGYDSRPAGYDSRPAGYDSRPAGYDSRPAGYDSRPAGYDSRPAGYDSRPAGYDSRPAGYDSRPAGYDSRPAGYDSRPAGYDSRPAGYDSRPAGYDSRPAGYDSRPAGYDSRPAGYDSRPAGYDSRPAGYDSRPAGYDSRPAGYDSRPAGYDSRPAGYDSRPAGYDSRPAGYDSRPAGYDSRPAGYDSRPAGYDSRPAGYDSRPAGYDSRPAGYDSRPAGYDSRPAGYDSRPAGYDSRPAGYDSRPAGYDSRPAGYDSRPAGYDSRPAGYDSRPAGYDSRPAGYDSRPAGYDSRPAGYDSRPAGYDSRPAGYDSRPAGYDSRPAGYDSRPAGYDSRPAGYDSRPAGYDSRPAGYDSRPAGYDSRPAGYDSRPAGYDSRPAGYDSRPAGYDSRPAGYDSRPAGYDSRPAGYDSRPAGYDSRPAGYDSRPAGYDSRPAGYDSRPAGYDSRPAGYDSRPAGYDSRPAGYDSRPAGYDSRPAGYDSRPAGYDSRPAGYDSRPAGYDSRPAGYDSRPAGYDSRPAGYDSRPAGYDSRPAGYDSRPAGYDSRPAGYDSRPAGYDSRPAGYDSRPAGYDSRPAGYDSRPAGYDSRPAGYDSRPAGYDSRPAGYDSRPAGYDSRPAGYDSRPAGYDSRPAGYDSRPAGYDSRPAGYDSRPAGYDSRPAGYDSRPAGYDSRPAGYDSRPAGYDSRPAGYDSRPAGYDSRPAGYDSRPAGYDSRPAGYDSRPAGYDSRPAGYDSRPAGYDSRPAGYDSRPAGYDSRPAGYDSRPAGYDSRPAGYDSRPAGYDSRPAGYDSRPAGYDSRPAGYDSRPAGYDSRPAGYDSRPAGYDSRPAGYDSRPAGYDSRPAGYDSRPAGYDSRPAGYDSRPAGYDSRPAGYDSRPAGYDSRPAGYDSRPAGYDSRPAGYDSRPAGYDSRPAGYDSRPAGYDSRPAGYDSRPAGYDSRPAGYDSRPAGYDSRPAGYDSRPAGYDSRPAGYDSRPAGYDSRPAGYDSRPAGYDSRPAGYDSRPAGYDSRPAGYDSRPAGYDSRPAGYDSRPAGYDSRPAGYDSRPAGYDSRPAGYDSRPAGYDSRPAGYDSRPAGYDSRPAGYDSRPAGYDSRPAGYDSRPAGYDSRPAGYDSRPAGYDSRPAGYDSRPAGYDSRPAGYDSRPAGYDSRPAGYDSRPAGYDSRPAGYDSRPAGYDSRPAGYDSRPAGYDSRPAGYDSRPAGYDSRPAGYDSRPAGYDSRPAGYDSRPAGYDSRPAGYDSRPAGYDSRPAGYDSRPAGYDSRPAGYDSRPAGYDSRPAGYDSRPAGYDSRPAGYDSRPAGYDSRPAGYDSRPAGYDSRPAGYDSRPAGYDSRPAGYDSRPAGYDSRPAGYDSRPAGYDSRPAGYDSRPAGYDSRPAGYDSRPAGYDSRPAGYDSRPAGYDSRPAGYDSRPAGYDSRPAGYDSRPAGYDSRPAGYDSRPAGYDSRPAGYDSRPAGYDSRPAGYDSRPAGYDSRPAGYDSRPAGYDSRPAGYDSRPAGYDSRPAGYDSRPAGYDSRPAGYDSRPAGYDSRPAGYDSRPAGYDSRPAGYDSRPAGYDSRPAGYDSRPAGYDSRPAGYDSRPAGYDSRPAGYDSRPAGYDSRPAGYDSRPAGYDSRPAGYDSRPAGYDSRPAGYDSRPAGYDSRPAGYDSRPAGYDSRPAGYDSRPAGYDSRPAGYDSRPAGYDSRPAGYDSRPAGYDSRPAGYDSRPAGYDSRPAGYDSRPAGYDSRPAGYDSRPAGYDSRPAGYDSRPAGYDSRPAGYDSRPAGYDSRPAGYDSRPAGYDSRPAGYDSRPAGYDSRPAGYDSRPAGYDSRPAGYDSRPAGYDSRPAGYDSRPAGYDSRPAGYDSRPAGYDSRPAGYDSRPAGYDSRPAGYDSRPAGYDSRPAGYDSRPAGYDSRPAGYDSRPAGYDSRPAGYDSRPAGYDSRPAGYDSRPAGYDSRPAGYDSRPAGYDSRPAGYDSRPAGYDSRPAGYDSRPAGYDSRPAGYDSRPAGYDSRPAGYDSRPAGYDSRPAGYDSRPAGYDSRPAGYDSRPAGYDSRPAGYDSRPAGYDSRPAGYDSRPAGYDSRPAGYDSRPAGYDSRPAGYDSRPAGYDSRPAGYDSRPAGYDSRPAGYDSRPAGYDSRPAGYDSRPAGYDSRPAGYDSRPAGYDSRPAGYDSRPAGYDSRPAGYDSRPAGYDSRPAGYDSRPAGYDSRPAGYDSRPAGYDSRPAGYDSRPAGYDSRPAGYDSRPAGYDSRPAGYDSRPAGYDSRPAGYDSRPAGYDSRPAGYDSRPAGYDSRPAGYDSRPAGYDSRPAGYDSRPAGYDSRPAGYDSRPAGYDSRPAGYDSRPAGYDSRPAGYDSRPAGYDSRPAGYDSRPAGYDSRPAGYDSRPAGYDSRPAGYDSRPAGYDSRPAGYDSRPAGYDSRPAGYDSRPAGYDSRPAGYDSRPAGYDSRPAGYDSRPAGYDSRPAGYDSRPAGYDSRPAGYDSRPAGYDSRPAGYDSRPAGYDSRPAGYDSRPAGYDSRPAGYDSRPAGYDSRPAGYDSRPAGYDSRPAGYDSRPAGYDSRPAGYDSRPAGYDSRPAGYDSRPAGYDSRPAGYDSRPAGYDSRPAGYDSRPAGYDSRPAGYDSRPAGYDSRPAGYDSRPAGYDSRPAGYDSRPAGYDSRPAGYDSRPAGYDSRPAGYDSRPAGYDSRPAGYDSRPAGYDSRPAGYDSRPAGYDSRPAGYDSRPAGYDSRPAGYDSRPAGYDSRPAGYDSRPAGYDSRPAGYDSRPAGYDSRPAGYDSRPAGYDSRPAGYDSRPAGYDSRPAGYDSRPAGYDSRPAGYDSRPAGYDSRPAGYDSRPAGYDSRPAGYDSRPAGYDSRPAGYDSRPAGYDSRPAGYDSRPAGYDSRPAGYDSRPAGYDSRPAGYDSRPAGYDSRPAGYDSRPAGYDSRPAGYDSRPAGYDSRPAGYDSRPAGYDSRPAGYDSRPAGYDSRPAGYDSRPAGYDSRPAGYDSRPAGYDSRPAGYDSRPAGYDSRPAGYDSRPAGYDSRPAGYDSRPAGYDSRPAGYDSRPAGYDSRPAGYDSRPAGYDSRPAGYDSRPAGYDSRPAGYDSRPAGYDSRPAGYDSRPAGYDSRPAGYDSRPAGYDSRPAGYDSRPAGYDSRPAGYDSRPAGYDSRPAGYDS

SEQ ID NO: 7 - protein, 3500 aa, synthetic construct
  REGION 1..3500: note = resilin-like polypeptide
  VARIANT 8..3500: note = May be present or absent in groups of the repeat unit Gly Arg GlyAsp Ser Tyr Pro
GRGDSYPGRGDSYPGRGDSYPGRGDSYPGRGDSYPGRGDSYPGRGDSYPGRGDSYPGRGDSYPGRGDSYPGRGDSYPGRGDSYPGRGDSYPGRGDSYPGRGDSYPGRGDSYPGRGDSYPGRGDSYPGRGDSYPGRGDSYPGRGDSYPGRGDSYPGRGDSYPGRGDSYPGRGDSYPGRGDSYPGRGDSYPGRGDSYPGRGDSYPGRGDSYPGRGDSYPGRGDSYPGRGDSYPGRGDSYPGRGDSYPGRGDSYPGRGDSYPGRGDSYPGRGDSYPGRGDSYPGRGDSYPGRGDSYPGRGDSYPGRGDSYPGRGDSYPGRGDSYPGRGDSYPGRGDSYPGRGDSYPGRGDSYPGRGDSYPGRGDSYPGRGDSYPGRGDSYPGRGDSYPGRGDSYPGRGDSYPGRGDSYPGRGDSYPGRGDSYPGRGDSYPGRGDSYPGRGDSYPGRGDSYPGRGDSYPGRGDSYPGRGDSYPGRGDSYPGRGDSYPGRGDSYPGRGDSYPGRGDSYPGRGDSYPGRGDSYPGRGDSYPGRGDSYPGRGDSYPGRGDSYPGRGDSYPGRGDSYPGRGDSYPGRGDSYPGRGDSYPGRGDSYPGRGDSYPGRGDSYPGRGDSYPGRGDSYPGRGDSYPGRGDSYPGRGDSYPGRGDSYPGRGDSYPGRGDSYPGRGDSYPGRGDSYPGRGDSYPGRGDSYPGRGDSYPGRGDSYPGRGDSYPGRGDSYPGRGDSYPGRGDSYPGRGDSYPGRGDSYPGRGDSYPGRGDSYPGRGDSYPGRGDSYPGRGDSYPGRGDSYPGRGDSYPGRGDSYPGRGDSYPGRGDSYPGRGDSYPGRGDSYPGRGDSYPGRGDSYPGRGDSYPGRGDSYPGRGDSYPGRGDSYPGRGDSYPGRGDSYPGRGDSYPGRGDSYPGRGDSYPGRGDSYPGRGDSYPGRGDSYPGRGDSYPGRGDSYPGRGDSYPGRGDSYPGRGDSYPGRGDSYPGRGDSYPGRGDSYPGRGDSYPGRGDSYPGRGDSYPGRGDSYPGRGDSYPGRGDSYPGRGDSYPGRGDSYPGRGDSYPGRGDSYPGRGDSYPGRGDSYPGRGDSYPGRGDSYPGRGDSYPGRGDSYPGRGDSYPGRGDSYPGRGDSYPGRGDSYPGRGDSYPGRGDSYPGRGDSYPGRGDSYPGRGDSYPGRGDSYPGRGDSYPGRGDSYPGRGDSYPGRGDSYPGRGDSYPGRGDSYPGRGDSYPGRGDSYPGRGDSYPGRGDSYPGRGDSYPGRGDSYPGRGDSYPGRGDSYPGRGDSYPGRGDSYPGRGDSYPGRGDSYPGRGDSYPGRGDSYPGRGDSYPGRGDSYPGRGDSYPGRGDSYPGRGDSYPGRGDSYPGRGDSYPGRGDSYPGRGDSYPGRGDSYPGRGDSYPGRGDSYPGRGDSYPGRGDSYPGRGDSYPGRGDSYPGRGDSYPGRGDSYPGRGDSYPGRGDSYPGRGDSYPGRGDSYPGRGDSYPGRGDSYPGRGDSYPGRGDSYPGRGDSYPGRGDSYPGRGDSYPGRGDSYPGRGDSYPGRGDSYPGRGDSYPGRGDSYPGRGDSYPGRGDSYPGRGDSYPGRGDSYPGRGDSYPGRGDSYPGRGDSYPGRGDSYPGRGDSYPGRGDSYPGRGDSYPGRGDSYPGRGDSYPGRGDSYPGRGDSYPGRGDSYPGRGDSYPGRGDSYPGRGDSYPGRGDSYPGRGDSYPGRGDSYPGRGDSYPGRGDSYPGRGDSYPGRGDSYPGRGDSYPGRGDSYPGRGDSYPGRGDSYPGRGDSYPGRGDSYPGRGDSYPGRGDSYPGRGDSYPGRGDSYPGRGDSYPGRGDSYPGRGDSYPGRGDSYPGRGDSYPGRGDSYPGRGDSYPGRGDSYPGRGDSYPGRGDSYPGRGDSYPGRGDSYPGRGDSYPGRGDSYPGRGDSYPGRGDSYPGRGDSYPGRGDSYPGRGDSYPGRGDSYPGRGDSYPGRGDSYPGRGDSYPGRGDSYPGRGDSYPGRGDSYPGRGDSYPGRGDSYPGRGDSYPGRGDSYPGRGDSYPGRGDSYPGRGDSYPGRGDSYPGRGDSYPGRGDSYPGRGDSYPGRGDSYPGRGDSYPGRGDSYPGRGDSYPGRGDSYPGRGDSYPGRGDSYPGRGDSYPGRGDSYPGRGDSYPGRGDSYPGRGDSYPGRGDSYPGRGDSYPGRGDSYPGRGDSYPGRGDSYPGRGDSYPGRGDSYPGRGDSYPGRGDSYPGRGDSYPGRGDSYPGRGDSYPGRGDSYPGRGDSYPGRGDSYPGRGDSYPGRGDSYPGRGDSYPGRGDSYPGRGDSYPGRGDSYPGRGDSYPGRGDSYPGRGDSYPGRGDSYPGRGDSYPGRGDSYPGRGDSYPGRGDSYPGRGDSYPGRGDSYPGRGDSYPGRGDSYPGRGDSYPGRGDSYPGRGDSYPGRGDSYPGRGDSYPGRGDSYPGRGDSYPGRGDSYPGRGDSYPGRGDSYPGRGDSYPGRGDSYPGRGDSYPGRGDSYPGRGDSYPGRGDSYPGRGDSYPGRGDSYPGRGDSYPGRGDSYPGRGDSYPGRGDSYPGRGDSYPGRGDSYPGRGDSYPGRGDSYPGRGDSYPGRGDSYPGRGDSYPGRGDSYPGRGDSYPGRGDSYPGRGDSYPGRGDSYPGRGDSYPGRGDSYPGRGDSYPGRGDSYPGRGDSYPGRGDSYPGRGDSYPGRGDSYPGRGDSYPGRGDSYPGRGDSYPGRGDSYPGRGDSYPGRGDSYPGRGDSYPGRGDSYPGRGDSYPGRGDSYPGRGDSYPGRGDSYPGRGDSYPGRGDSYPGRGDSYPGRGDSYPGRGDSYPGRGDSYPGRGDSYPGRGDSYPGRGDSYPGRGDSYPGRGDSYPGRGDSYPGRGDSYPGRGDSYPGRGDSYPGRGDSYPGRGDSYPGRGDSYPGRGDSYPGRGDSYPGRGDSYPGRGDSYPGRGDSYPGRGDSYPGRGDSYPGRGDSYPGRGDSYPGRGDSYPGRGDSYPGRGDSYPGRGDSYPGRGDSYPGRGDSYPGRGDSYPGRGDSYPGRGDSYPGRGDSYPGRGDSYPGRGDSYPGRGDSYPGRGDSYPGRGDSYPGRGDSYPGRGDSYPGRGDSYPGRGDSYPGRGDSYPGRGDSYPGRGDSYPGRGDSYPGRGDSYPGRGDSYPGRGDSYPGRGDSYPGRGDSYPGRGDSYPGRGDSYPGRGDSYPGRGDSYPGRGDSYPGRGDSYPGRGDSYPGRGDSYPGRGDSYPGRGDSYPGRGDSYPGRGDSYPGRGDSYPGRGDSYPGRGDSYPGRGDSYPGRGDSYPGRGDSYPGRGDSYPGRGDSYPGRGDSYPGRGDSYPGRGDSYPGRGDSYPGRGDSYPGRGDSYPGRGDSYPGRGDSYPGRGDSYPGRGDSYPGRGDSYPGRGDSYPGRGDSYPGRGDSYPGRGDSYPGRGDSYPGRGDSYPGRGDSYPGRGDSYPGRGDSYPGRGDSYPGRGDSYPGRGDSYPGRGDSYPGRGDSYPGRGDSYPGRGDSYPGRGDSYPGRGDSYPGRGDSYPGRGDSYPGRGDSYPGRGDSYP

SEQ ID NO: 8 - protein, 4000 aa, synthetic construct
  REGION 1..4000: note = resilin-like polypeptide
  VARIANT 9..4000: note = May be present or absent in groups of the repeat unit Gly Arg GlyAsp Ser Pro Tyr Gln
GRGDSPYQGRGDSPYQGRGDSPYQGRGDSPYQGRGDSPYQGRGDSPYQGRGDSPYQGRGDSPYQGRGDSPYQGRGDSPYQGRGDSPYQGRGDSPYQGRGDSPYQGRGDSPYQGRGDSPYQGRGDSPYQGRGDSPYQGRGDSPYQGRGDSPYQGRGDSPYQGRGDSPYQGRGDSPYQGRGDSPYQGRGDSPYQGRGDSPYQGRGDSPYQGRGDSPYQGRGDSPYQGRGDSPYQGRGDSPYQGRGDSPYQGRGDSPYQGRGDSPYQGRGDSPYQGRGDSPYQGRGDSPYQGRGDSPYQGRGDSPYQGRGDSPYQGRGDSPYQGRGDSPYQGRGDSPYQGRGDSPYQGRGDSPYQGRGDSPYQGRGDSPYQGRGDSPYQGRGDSPYQGRGDSPYQGRGDSPYQGRGDSPYQGRGDSPYQGRGDSPYQGRGDSPYQGRGDSPYQGRGDSPYQGRGDSPYQGRGDSPYQGRGDSPYQGRGDSPYQGRGDSPYQGRGDSPYQGRGDSPYQGRGDSPYQGRGDSPYQGRGDSPYQGRGDSPYQGRGDSPYQGRGDSPYQGRGDSPYQGRGDSPYQGRGDSPYQGRGDSPYQGRGDSPYQGRGDSPYQGRGDSPYQGRGDSPYQGRGDSPYQGRGDSPYQGRGDSPYQGRGDSPYQGRGDSPYQGRGDSPYQGRGDSPYQGRGDSPYQGRGDSPYQGRGDSPYQGRGDSPYQGRGDSPYQGRGDSPYQGRGDSPYQGRGDSPYQGRGDSPYQGRGDSPYQGRGDSPYQGRGDSPYQGRGDSPYQGRGDSPYQGRGDSPYQGRGDSPYQGRGDSPYQGRGDSPYQGRGDSPYQGRGDSPYQGRGDSPYQGRGDSPYQGRGDSPYQGRGDSPYQGRGDSPYQGRGDSPYQGRGDSPYQGRGDSPYQGRGDSPYQGRGDSPYQGRGDSPYQGRGDSPYQGRGDSPYQGRGDSPYQGRGDSPYQGRGDSPYQGRGDSPYQGRGDSPYQGRGDSPYQGRGDSPYQGRGDSPYQGRGDSPYQGRGDSPYQGRGDSPYQGRGDSPYQGRGDSPYQGRGDSPYQGRGDSPYQGRGDSPYQGRGDSPYQGRGDSPYQGRGDSPYQGRGDSPYQGRGDSPYQGRGDSPYQGRGDSPYQGRGDSPYQGRGDSPYQGRGDSPYQGRGDSPYQGRGDSPYQGRGDSPYQGRGDSPYQGRGDSPYQGRGDSPYQGRGDSPYQGRGDSPYQGRGDSPYQGRGDSPYQGRGDSPYQGRGDSPYQGRGDSPYQGRGDSPYQGRGDSPYQGRGDSPYQGRGDSPYQGRGDSPYQGRGDSPYQGRGDSPYQGRGDSPYQGRGDSPYQGRGDSPYQGRGDSPYQGRGDSPYQGRGDSPYQGRGDSPYQGRGDSPYQGRGDSPYQGRGDSPYQGRGDSPYQGRGDSPYQGRGDSPYQGRGDSPYQGRGDSPYQGRGDSPYQGRGDSPYQGRGDSPYQGRGDSPYQGRGDSPYQGRGDSPYQGRGDSPYQGRGDSPYQGRGDSPYQGRGDSPYQGRGDSPYQGRGDSPYQGRGDSPYQGRGDSPYQGRGDSPYQGRGDSPYQGRGDSPYQGRGDSPYQGRGDSPYQGRGDSPYQGRGDSPYQGRGDSPYQGRGDSPYQGRGDSPYQGRGDSPYQGRGDSPYQGRGDSPYQGRGDSPYQGRGDSPYQGRGDSPYQGRGDSPYQGRGDSPYQGRGDSPYQGRGDSPYQGRGDSPYQGRGDSPYQGRGDSPYQGRGDSPYQGRGDSPYQGRGDSPYQGRGDSPYQGRGDSPYQGRGDSPYQGRGDSPYQGRGDSPYQGRGDSPYQGRGDSPYQGRGDSPYQGRGDSPYQGRGDSPYQGRGDSPYQGRGDSPYQGRGDSPYQGRGDSPYQGRGDSPYQGRGDSPYQGRGDSPYQGRGDSPYQGRGDSPYQGRGDSPYQGRGDSPYQGRGDSPYQGRGDSPYQGRGDSPYQGRGDSPYQGRGDSPYQGRGDSPYQGRGDSPYQGRGDSPYQGRGDSPYQGRGDSPYQGRGDSPYQGRGDSPYQGRGDSPYQGRGDSPYQGRGDSPYQGRGDSPYQGRGDSPYQGRGDSPYQGRGDSPYQGRGDSPYQGRGDSPYQGRGDSPYQGRGDSPYQGRGDSPYQGRGDSPYQGRGDSPYQGRGDSPYQGRGDSPYQGRGDSPYQGRGDSPYQGRGDSPYQGRGDSPYQGRGDSPYQGRGDSPYQGRGDSPYQGRGDSPYQGRGDSPYQGRGDSPYQGRGDSPYQGRGDSPYQGRGDSPYQGRGDSPYQGRGDSPYQGRGDSPYQGRGDSPYQGRGDSPYQGRGDSPYQGRGDSPYQGRGDSPYQGRGDSPYQGRGDSPYQGRGDSPYQGRGDSPYQGRGDSPYQGRGDSPYQGRGDSPYQGRGDSPYQGRGDSPYQGRGDSPYQGRGDSPYQGRGDSPYQGRGDSPYQGRGDSPYQGRGDSPYQGRGDSPYQGRGDSPYQGRGDSPYQGRGDSPYQGRGDSPYQGRGDSPYQGRGDSPYQGRGDSPYQGRGDSPYQGRGDSPYQGRGDSPYQGRGDSPYQGRGDSPYQGRGDSPYQGRGDSPYQGRGDSPYQGRGDSPYQGRGDSPYQGRGDSPYQGRGDSPYQGRGDSPYQGRGDSPYQGRGDSPYQGRGDSPYQGRGDSPYQGRGDSPYQGRGDSPYQGRGDSPYQGRGDSPYQGRGDSPYQGRGDSPYQGRGDSPYQGRGDSPYQGRGDSPYQGRGDSPYQGRGDSPYQGRGDSPYQGRGDSPYQGRGDSPYQGRGDSPYQGRGDSPYQGRGDSPYQGRGDSPYQGRGDSPYQGRGDSPYQGRGDSPYQGRGDSPYQGRGDSPYQGRGDSPYQGRGDSPYQGRGDSPYQGRGDSPYQGRGDSPYQGRGDSPYQGRGDSPYQGRGDSPYQGRGDSPYQGRGDSPYQGRGDSPYQGRGDSPYQGRGDSPYQGRGDSPYQGRGDSPYQGRGDSPYQGRGDSPYQGRGDSPYQGRGDSPYQGRGDSPYQGRGDSPYQGRGDSPYQGRGDSPYQGRGDSPYQGRGDSPYQGRGDSPYQGRGDSPYQGRGDSPYQGRGDSPYQGRGDSPYQGRGDSPYQGRGDSPYQGRGDSPYQGRGDSPYQGRGDSPYQGRGDSPYQGRGDSPYQGRGDSPYQGRGDSPYQGRGDSPYQGRGDSPYQGRGDSPYQGRGDSPYQGRGDSPYQGRGDSPYQGRGDSPYQGRGDSPYQGRGDSPYQGRGDSPYQGRGDSPYQGRGDSPYQGRGDSPYQGRGDSPYQGRGDSPYQGRGDSPYQGRGDSPYQGRGDSPYQGRGDSPYQGRGDSPYQGRGDSPYQGRGDSPYQGRGDSPYQGRGDSPYQGRGDSPYQGRGDSPYQGRGDSPYQGRGDSPYQGRGDSPYQGRGDSPYQGRGDSPYQGRGDSPYQGRGDSPYQGRGDSPYQGRGDSPYQGRGDSPYQGRGDSPYQGRGDSPYQGRGDSPYQGRGDSPYQGRGDSPYQGRGDSPYQGRGDSPYQGRGDSPYQGRGDSPYQGRGDSPYQGRGDSPYQGRGDSPYQGRGDSPYQGRGDSPYQGRGDSPYQGRGDSPYQGRGDSPYQGRGDSPYQGRGDSPYQGRGDSPYQGRGDSPYQGRGDSPYQGRGDSPYQGRGDSPYQGRGDSPYQGRGDSPYQGRGDSPYQGRGDSPYQGRGDSPYQGRGDSPYQGRGDSPYQGRGDSPYQGRGDSPYQGRGDSPYQGRGDSPYQGRGDSPYQGRGDSPYQGRGDSPYQGRGDSPYQGRGDSPYQGRGDSPYQGRGDSPYQGRGDSPYQGRGDSPYQGRGDSPYQGRGDSPYQGRGDSPYQGRGDSPYQGRGDSPYQGRGDSPYQGRGDSPYQGRGDSPYQGRGDSPYQGRGDSPYQGRGDSPYQGRGDSPYQGRGDSPYQGRGDSPYQGRGDSPYQGRGDSPYQGRGDSPYQGRGDSPYQGRGDSPYQGRGDSPYQGRGDSPYQGRGDSPYQGRGDSPYQGRGDSPYQGRGDSPYQGRGDSPYQGRGDSPYQGRGDSPYQGRGDSPYQGRGDSPYQ

SEQ ID NO: 9 - protein, 4000 aa, synthetic construct
  REGION 1..4000: note = resilin-like polypeptide
  VARIANT 9..4000: note = May be present or absent in groups of the repeat unit Gly Arg GlyAsn Ser Pro Tyr Gly
GRGNSPYGGRGNSPYGGRGNSPYGGRGNSPYGGRGNSPYGGRGNSPYGGRGNSPYGGRGNSPYGGRGNSPYGGRGNSPYGGRGNSPYGGRGNSPYGGRGNSPYGGRGNSPYGGRGNSPYGGRGNSPYGGRGNSPYGGRGNSPYGGRGNSPYGGRGNSPYGGRGNSPYGGRGNSPYGGRGNSPYGGRGNSPYGGRGNSPYGGRGNSPYGGRGNSPYGGRGNSPYGGRGNSPYGGRGNSPYGGRGNSPYGGRGNSPYGGRGNSPYGGRGNSPYGGRGNSPYGGRGNSPYGGRGNSPYGGRGNSPYGGRGNSPYGGRGNSPYGGRGNSPYGGRGNSPYGGRGNSPYGGRGNSPYGGRGNSPYGGRGNSPYGGRGNSPYGGRGNSPYGGRGNSPYGGRGNSPYGGRGNSPYGGRGNSPYGGRGNSPYGGRGNSPYGGRGNSPYGGRGNSPYGGRGNSPYGGRGNSPYGGRGNSPYGGRGNSPYGGRGNSPYGGRGNSPYGGRGNSPYGGRGNSPYGGRGNSPYGGRGNSPYGGRGNSPYGGRGNSPYGGRGNSPYGGRGNSPYGGRGNSPYGGRGNSPYGGRGNSPYGGRGNSPYGGRGNSPYGGRGNSPYGGRGNSPYGGRGNSPYGGRGNSPYGGRGNSPYGGRGNSPYGGRGNSPYGGRGNSPYGGRGNSPYGGRGNSPYGGRGNSPYGGRGNSPYGGRGNSPYGGRGNSPYGGRGNSPYGGRGNSPYGGRGNSPYGGRGNSPYGGRGNSPYGGRGNSPYGGRGNSPYGGRGNSPYGGRGNSPYGGRGNSPYGGRGNSPYGGRGNSPYGGRGNSPYGGRGNSPYGGRGNSPYGGRGNSPYGGRGNSPYGGRGNSPYGGRGNSPYGGRGNSPYGGRGNSPYGGRGNSPYGGRGNSPYGGRGNSPYGGRGNSPYGGRGNSPYGGRGNSPYGGRGNSPYGGRGNSPYGGRGNSPYGGRGNSPYGGRGNSPYGGRGNSPYGGRGNSPYGGRGNSPYGGRGNSPYGGRGNSPYGGRGNSPYGGRGNSPYGGRGNSPYGGRGNSPYGGRGNSPYGGRGNSPYGGRGNSPYGGRGNSPYGGRGNSPYGGRGNSPYGGRGNSPYGGRGNSPYGGRGNSPYGGRGNSPYGGRGNSPYGGRGNSPYGGRGNSPYGGRGNSPYGGRGNSPYGGRGNSPYGGRGNSPYGGRGNSPYGGRGNSPYGGRGNSPYGGRGNSPYGGRGNSPYGGRGNSPYGGRGNSPYGGRGNSPYGGRGNSPYGGRGNSPYGGRGNSPYGGRGNSPYGGRGNSPYGGRGNSPYGGRGNSPYGGRGNSPYGGRGNSPYGGRGNSPYGGRGNSPYGGRGNSPYGGRGNSPYGGRGNSPYGGRGNSPYGGRGNSPYGGRGNSPYGGRGNSPYGGRGNSPYGGRGNSPYGGRGNSPYGGRGNSPYGGRGNSPYGGRGNSPYGGRGNSPYGGRGNSPYGGRGNSPYGGRGNSPYGGRGNSPYGGRGNSPYGGRGNSPYGGRGNSPYGGRGNSPYGGRGNSPYGGRGNSPYGGRGNSPYGGRGNSPYGGRGNSPYGGRGNSPYGGRGNSPYGGRGNSPYGGRGNSPYGGRGNSPYGGRGNSPYGGRGNSPYGGRGNSPYGGRGNSPYGGRGNSPYGGRGNSPYGGRGNSPYGGRGNSPYGGRGNSPYGGRGNSPYGGRGNSPYGGRGNSPYGGRGNSPYGGRGNSPYGGRGNSPYGGRGNSPYGGRGNSPYGGRGNSPYGGRGNSPYGGRGNSPYGGRGNSPYGGRGNSPYGGRGNSPYGGRGNSPYGGRGNSPYGGRGNSPYGGRGNSPYGGRGNSPYGGRGNSPYGGRGNSPYGGRGNSPYGGRGNSPYGGRGNSPYGGRGNSPYGGRGNSPYGGRGNSPYGGRGNSPYGGRGNSPYGGRGNSPYGGRGNSPYGGRGNSPYGGRGNSPYGGRGNSPYGGRGNSPYGGRGNSPYGGRGNSPYGGRGNSPYGGRGNSPYGGRGNSPYGGRGNSPYGGRGNSPYGGRGNSPYGGRGNSPYGGRGNSPYGGRGNSPYGGRGNSPYGGRGNSPYGGRGNSPYGGRGNSPYGGRGNSPYGGRGNSPYGGRGNSPYGGRGNSPYGGRGNSPYGGRGNSPYGGRGNSPYGGRGNSPYGGRGNSPYGGRGNSPYGGRGNSPYGGRGNSPYGGRGNSPYGGRGNSPYGGRGNSPYGGRGNSPYGGRGNSPYGGRGNSPYGGRGNSPYGGRGNSPYGGRGNSPYGGRGNSPYGGRGNSPYGGRGNSPYGGRGNSPYGGRGNSPYGGRGNSPYGGRGNSPYGGRGNSPYGGRGNSPYGGRGNSPYGGRGNSPYGGRGNSPYGGRGNSPYGGRGNSPYGGRGNSPYGGRGNSPYGGRGNSPYGGRGNSPYGGRGNSPYGGRGNSPYGGRGNSPYGGRGNSPYGGRGNSPYGGRGNSPYGGRGNSPYGGRGNSPYGGRGNSPYGGRGNSPYGGRGNSPYGGRGNSPYGGRGNSPYGGRGNSPYGGRGNSPYGGRGNSPYGGRGNSPYGGRGNSPYGGRGNSPYGGRGNSPYGGRGNSPYGGRGNSPYGGRGNSPYGGRGNSPYGGRGNSPYGGRGNSPYGGRGNSPYGGRGNSPYGGRGNSPYGGRGNSPYGGRGNSPYGGRGNSPYGGRGNSPYGGRGNSPYGGRGNSPYGGRGNSPYGGRGNSPYGGRGNSPYGGRGNSPYGGRGNSPYGGRGNSPYGGRGNSPYGGRGNSPYGGRGNSPYGGRGNSPYGGRGNSPYGGRGNSPYGGRGNSPYGGRGNSPYGGRGNSPYGGRGNSPYGGRGNSPYGGRGNSPYGGRGNSPYGGRGNSPYGGRGNSPYGGRGNSPYGGRGNSPYGGRGNSPYGGRGNSPYGGRGNSPYGGRGNSPYGGRGNSPYGGRGNSPYGGRGNSPYGGRGNSPYGGRGNSPYGGRGNSPYGGRGNSPYGGRGNSPYGGRGNSPYGGRGNSPYGGRGNSPYGGRGNSPYGGRGNSPYGGRGNSPYGGRGNSPYGGRGNSPYGGRGNSPYGGRGNSPYGGRGNSPYGGRGNSPYGGRGNSPYGGRGNSPYGGRGNSPYGGRGNSPYGGRGNSPYGGRGNSPYGGRGNSPYGGRGNSPYGGRGNSPYGGRGNSPYGGRGNSPYGGRGNSPYGGRGNSPYGGRGNSPYGGRGNSPYGGRGNSPYGGRGNSPYGGRGNSPYGGRGNSPYGGRGNSPYGGRGNSPYGGRGNSPYGGRGNSPYGGRGNSPYGGRGNSPYGGRGNSPYGGRGNSPYGGRGNSPYGGRGNSPYGGRGNSPYGGRGNSPYGGRGNSPYGGRGNSPYGGRGNSPYGGRGNSPYGGRGNSPYGGRGNSPYGGRGNSPYGGRGNSPYGGRGNSPYGGRGNSPYGGRGNSPYGGRGNSPYGGRGNSPYGGRGNSPYGGRGNSPYGGRGNSPYGGRGNSPYGGRGNSPYGGRGNSPYGGRGNSPYGGRGNSPYGGRGNSPYGGRGNSPYGGRGNSPYGGRGNSPYGGRGNSPYGGRGNSPYGGRGNSPYGGRGNSPYGGRGNSPYGGRGNSPYGGRGNSPYGGRGNSPYGGRGNSPYGGRGNSPYGGRGNSPYGGRGNSPYGGRGNSPYGGRGNSPYGGRGNSPYGGRGNSPYGGRGNSPYGGRGNSPYGGRGNSPYGGRGNSPYGGRGNSPYGGRGNSPYGGRGNSPYGGRGNSPYGGRGNSPYGGRGNSPYGGRGNSPYGGRGNSPYGGRGNSPYGGRGNSPYGGRGNSPYGGRGNSPYGGRGNSPYGGRGNSPYGGRGNSPYGGRGNSPYGGRGNSPYGGRGNSPYGGRGNSPYGGRGNSPYGGRGNSPYGGRGNSPYGGRGNSPYGGRGNSPYGGRGNSPYGGRGNSPYGGRGNSPYGGRGNSPYGGRGNSPYGGRGNSPYGGRGNSPYGGRGNSPYGGRGNSPYGGRGNSPYGGRGNSPYGGRGNSPYGGRGNSPYGGRGNSPYGGRGNSPYGGRGNSPYGGRGNSPYGGRGNSPYGGRGNSPYGGRGNSPYGGRGNSPYGGRGNSPYG

SEQ ID NO: 10 - protein, 2500 aa, synthetic construct
  REGION 1..2500: note = elastin-like polypeptide
  VARIANT 4: note = Xaa can be any naturally occurring amino acid
  VARIANT 6..2500: note = May be present or absent in groups of the repeat unit Val Pro GlyXaa Gly
  VARIANT 9: note = Xaa can be any naturally occurring amino acid
  VARIANT 14: note = Xaa can be any naturally occurring amino acid
  VARIANT 19: note = Xaa can be any naturally occurring amino acid
  VARIANT 24: note = Xaa can be any naturally occurring amino acid
  VARIANT 29: note = Xaa can be any naturally occurring amino acid
  VARIANT 34: note = Xaa can be any naturally occurring amino acid
  VARIANT 39: note = Xaa can be any naturally occurring amino acid
  VARIANT 44: note = Xaa can be any naturally occurring amino acid
  VARIANT 49: note = Xaa can be any naturally occurring amino acid
  VARIANT 54: note = Xaa can be any naturally occurring amino acid
  VARIANT 59: note = Xaa can be any naturally occurring amino acid
  VARIANT 64: note = Xaa can be any naturally occurring amino acid
  VARIANT 69: note = Xaa can be any naturally occurring amino acid
  VARIANT 74: note = Xaa can be any naturally occurring amino acid
  VARIANT 79: note = Xaa can be any naturally occurring amino acid
  VARIANT 84: note = Xaa can be any naturally occurring amino acid
  VARIANT 89: note = Xaa can be any naturally occurring amino acid
  VARIANT 94: note = Xaa can be any naturally occurring amino acid
  VARIANT 99: note = Xaa can be any naturally occurring amino acid
  VARIANT 104: note = Xaa can be any naturally occurring amino acid
  VARIANT 109: note = Xaa can be any naturally occurring amino acid
  VARIANT 114: note = Xaa can be any naturally occurring amino acid
  VARIANT 119: note = Xaa can be any naturally occurring amino acid
  VARIANT 124: note = Xaa can be any naturally occurring amino acid
  VARIANT 129: note = Xaa can be any naturally occurring amino acid
  VARIANT 134: note = Xaa can be any naturally occurring amino acid
  VARIANT 139: note = Xaa can be any naturally occurring amino acid
  VARIANT 144: note = Xaa can be any naturally occurring amino acid
  VARIANT 149: note = Xaa can be any naturally occurring amino acid
  VARIANT 154: note = Xaa can be any naturally occurring amino acid
  VARIANT 159: note = Xaa can be any naturally occurring amino acid
  VARIANT 164: note = Xaa can be any naturally occurring amino acid
  VARIANT 169: note = Xaa can be any naturally occurring amino acid
  VARIANT 174: note = Xaa can be any naturally occurring amino acid
  VARIANT 179: note = Xaa can be any naturally occurring amino acid
  VARIANT 184: note = Xaa can be any naturally occurring amino acid
  VARIANT 189: note = Xaa can be any naturally occurring amino acid
  VARIANT 194: note = Xaa can be any naturally occurring amino acid
  VARIANT 199: note = Xaa can be any naturally occurring amino acid
  VARIANT 204: note = Xaa can be any naturally occurring amino acid
  VARIANT 209: note = Xaa can be any naturally occurring amino acid
  VARIANT 214: note = Xaa can be any naturally occurring amino acid
  VARIANT 219: note = Xaa can be any naturally occurring amino acid
  VARIANT 224: note = Xaa can be any naturally occurring amino acid
  VARIANT 229: note = Xaa can be any naturally occurring amino acid
  VARIANT 234: note = Xaa can be any naturally occurring amino acid
  VARIANT 239: note = Xaa can be any naturally occurring amino acid
  VARIANT 244: note = Xaa can be any naturally occurring amino acid
  VARIANT 249: note = Xaa can be any naturally occurring amino acid
  VARIANT 254: note = Xaa can be any naturally occurring amino acid
  VARIANT 259: note = Xaa can be any naturally occurring amino acid
  VARIANT 264: note = Xaa can be any naturally occurring amino acid
  VARIANT 269: note = Xaa can be any naturally occurring amino acid
  VARIANT 274: note = Xaa can be any naturally occurring amino acid
  VARIANT 279: note = Xaa can be any naturally occurring amino acid
  VARIANT 284: note = Xaa can be any naturally occurring amino acid
  VARIANT 289: note = Xaa can be any naturally occurring amino acid
  VARIANT 294: note = Xaa can be any naturally occurring amino acid
  VARIANT 299: note = Xaa can be any naturally occurring amino acid
  VARIANT 304: note = Xaa can be any naturally occurring amino acid
  VARIANT 309: note = Xaa can be any naturally occurring amino acid
  VARIANT 314: note = Xaa can be any naturally occurring amino acid
  VARIANT 319: note = Xaa can be any naturally occurring amino acid
  VARIANT 324: note = Xaa can be any naturally occurring amino acid
  VARIANT 329: note = Xaa can be any naturally occurring amino acid
  VARIANT 334: note = Xaa can be any naturally occurring amino acid
  VARIANT 339: note = Xaa can be any naturally occurring amino acid
  VARIANT 344: note = Xaa can be any naturally occurring amino acid
  VARIANT 349: note = Xaa can be any naturally occurring amino acid
  VARIANT 354: note = Xaa can be any naturally occurring amino acid
  VARIANT 359: note = Xaa can be any naturally occurring amino acid
  VARIANT 364: note = Xaa can be any naturally occurring amino acid
  VARIANT 369: note = Xaa can be any naturally occurring amino acid
  VARIANT 374: note = Xaa can be any naturally occurring amino acid
  VARIANT 379: note = Xaa can be any naturally occurring amino acid
  VARIANT 384: note = Xaa can be any naturally occurring amino acid
  VARIANT 389: note = Xaa can be any naturally occurring amino acid
  VARIANT 394: note = Xaa can be any naturally occurring amino acid
  VARIANT 399: note = Xaa can be any naturally occurring amino acid
  VARIANT 404: note = Xaa can be any naturally occurring amino acid
  VARIANT 409: note = Xaa can be any naturally occurring amino acid
  VARIANT 414: note = Xaa can be any naturally occurring amino acid
  VARIANT 419: note = Xaa can be any naturally occurring amino acid
  VARIANT 424: note = Xaa can be any naturally occurring amino acid
  VARIANT 429: note = Xaa can be any naturally occurring amino acid
  VARIANT 434: note = Xaa can be any naturally occurring amino acid
  VARIANT 439: note = Xaa can be any naturally occurring amino acid
  VARIANT 444: note = Xaa can be any naturally occurring amino acid
  VARIANT 449: note = Xaa can be any naturally occurring amino acid
  VARIANT 454: note = Xaa can be any naturally occurring amino acid
  VARIANT 459: note = Xaa can be any naturally occurring amino acid
  VARIANT 464: note = Xaa can be any naturally occurring amino acid
  VARIANT 469: note = Xaa can be any naturally occurring amino acid
  VARIANT 474: note = Xaa can be any naturally occurring amino acid
  VARIANT 479: note = Xaa can be any naturally occurring amino acid
  VARIANT 484: note = Xaa can be any naturally occurring amino acid
  VARIANT 489: note = Xaa can be any naturally occurring amino acid
  VARIANT 494: note = Xaa can be any naturally occurring amino acid
  VARIANT 499: note = Xaa can be any naturally occurring amino acid
  VARIANT 504: note = Xaa can be any naturally occurring amino acid
  VARIANT 509: note = Xaa can be any naturally occurring amino acid
  VARIANT 514: note = Xaa can be any naturally occurring amino acid
  VARIANT 519: note = Xaa can be any naturally occurring amino acid
  VARIANT 524: note = Xaa can be any naturally occurring amino acid
  VARIANT 529: note = Xaa can be any naturally occurring amino acid
  VARIANT 534: note = Xaa can be any naturally occurring amino acid
  VARIANT 539: note = Xaa can be any naturally occurring amino acid
  VARIANT 544: note = Xaa can be any naturally occurring amino acid
  VARIANT 549: note = Xaa can be any naturally occurring amino acid
  VARIANT 554: note = Xaa can be any naturally occurring amino acid
  VARIANT 559: note = Xaa can be any naturally occurring amino acid
  VARIANT 564: note = Xaa can be any naturally occurring amino acid
  VARIANT 569: note = Xaa can be any naturally occurring amino acid
  VARIANT 574: note = Xaa can be any naturally occurring amino acid
  VARIANT 579: note = Xaa can be any naturally occurring amino acid
  VARIANT 584: note = Xaa can be any naturally occurring amino acid
  VARIANT 589: note = Xaa can be any naturally occurring amino acid
  VARIANT 594: note = Xaa can be any naturally occurring amino acid
  VARIANT 599: note = Xaa can be any naturally occurring amino acid
  VARIANT 604: note = Xaa can be any naturally occurring amino acid
  VARIANT 609: note = Xaa can be any naturally occurring amino acid
  VARIANT 614: note = Xaa can be any naturally occurring amino acid
  VARIANT 619: note = Xaa can be any naturally occurring amino acid
  VARIANT 624: note = Xaa can be any naturally occurring amino acid
  VARIANT 629: note = Xaa can be any naturally occurring amino acid
  VARIANT 634: note = Xaa can be any naturally occurring amino acid
  VARIANT 639: note = Xaa can be any naturally occurring amino acid
  VARIANT 644: note = Xaa can be any naturally occurring amino acid
  VARIANT 649: note = Xaa can be any naturally occurring amino acid
  VARIANT 654: note = Xaa can be any naturally occurring amino acid
  VARIANT 659: note = Xaa can be any naturally occurring amino acid
  VARIANT 664: note = Xaa can be any naturally occurring amino acid
  VARIANT 669: note = Xaa can be any naturally occurring amino acid
  VARIANT 674: note = Xaa can be any naturally occurring amino acid
  VARIANT 679: note = Xaa can be any naturally occurring amino acid
  VARIANT 684: note = Xaa can be any naturally occurring amino acid
  VARIANT 689: note = Xaa can be any naturally occurring amino acid
  VARIANT 694: note = Xaa can be any naturally occurring amino acid
  VARIANT 699: note = Xaa can be any naturally occurring amino acid
  VARIANT 704: note = Xaa can be any naturally occurring amino acid
  VARIANT 709: note = Xaa can be any naturally occurring amino acid
  VARIANT 714: note = Xaa can be any naturally occurring amino acid
  VARIANT 719: note = Xaa can be any naturally occurring amino acid
  VARIANT 724: note = Xaa can be any naturally occurring amino acid
  VARIANT 729: note = Xaa can be any naturally occurring amino acid
  VARIANT 734: note = Xaa can be any naturally occurring amino acid
  VARIANT 739: note = Xaa can be any naturally occurring amino acid
  VARIANT 744: note = Xaa can be any naturally occurring amino acid
  VARIANT 749: note = Xaa can be any naturally occurring amino acid
  VARIANT 754: note = Xaa can be any naturally occurring amino acid
  VARIANT 759: note = Xaa can be any naturally occurring amino acid
  VARIANT 764: note = Xaa can be any naturally occurring amino acid
  VARIANT 769: note = Xaa can be any naturally occurring amino acid
  VARIANT 774: note = Xaa can be any naturally occurring amino acid
  VARIANT 779: note = Xaa can be any naturally occurring amino acid
  VARIANT 784: note = Xaa can be any naturally occurring amino acid
  VARIANT 789: note = Xaa can be any naturally occurring amino acid
  VARIANT 794: note = Xaa can be any naturally occurring amino acid
  VARIANT 799: note = Xaa can be any naturally occurring amino acid
  VARIANT 804: note = Xaa can be any naturally occurring amino acid
  VARIANT 809: note = Xaa can be any naturally occurring amino acid
  VARIANT 814: note = Xaa can be any naturally occurring amino acid
  VARIANT 819: note = Xaa can be any naturally occurring amino acid
  VARIANT 824: note = Xaa can be any naturally occurring amino acid
  VARIANT 829: note = Xaa can be any naturally occurring amino acid
  VARIANT 834: note = Xaa can be any naturally occurring amino acid
  VARIANT 839: note = Xaa can be any naturally occurring amino acid
  VARIANT 844: note = Xaa can be any naturally occurring amino acid
  VARIANT 849: note = Xaa can be any naturally occurring amino acid
  VARIANT 854: note = Xaa can be any naturally occurring amino acid
  VARIANT 859: note = Xaa can be any naturally occurring amino acid
  VARIANT 864: note = Xaa can be any naturally occurring amino acid
  VARIANT 869: note = Xaa can be any naturally occurring amino acid
  VARIANT 874: note = Xaa can be any naturally occurring amino acid
  VARIANT 879: note = Xaa can be any naturally occurring amino acid
  VARIANT 884: note = Xaa can be any naturally occurring amino acid
  VARIANT 889: note = Xaa can be any naturally occurring amino acid
  VARIANT 894: note = Xaa can be any naturally occurring amino acid
  VARIANT 899: note = Xaa can be any naturally occurring amino acid
  VARIANT 904: note = Xaa can be any naturally occurring amino acid
  VARIANT 909: note = Xaa can be any naturally occurring amino acid
  VARIANT 914: note = Xaa can be any naturally occurring amino acid
  VARIANT 919: note = Xaa can be any naturally occurring amino acid
  VARIANT 924: note = Xaa can be any naturally occurring amino acid
  VARIANT 929: note = Xaa can be any naturally occurring amino acid
  VARIANT 934: note = Xaa can be any naturally occurring amino acid
  VARIANT 939: note = Xaa can be any naturally occurring amino acid
  VARIANT 944: note = Xaa can be any naturally occurring amino acid
  VARIANT 949: note = Xaa can be any naturally occurring amino acid
  VARIANT 954: note = Xaa can be any naturally occurring amino acid
  VARIANT 959: note = Xaa can be any naturally occurring amino acid
  VARIANT 964: note = Xaa can be any naturally occurring amino acid
  VARIANT 969: note = Xaa can be any naturally occurring amino acid
  VARIANT 974: note = Xaa can be any naturally occurring amino acid
  VARIANT 979: note = Xaa can be any naturally occurring amino acid
  VARIANT 984: note = Xaa can be any naturally occurring amino acid
  VARIANT 989: note = Xaa can be any naturally occurring amino acid
  VARIANT 994: note = Xaa can be any naturally occurring amino acid
  VARIANT 999: note = Xaa can be any naturally occurring amino acid
  VARIANT 1004: note = Xaa can be any naturally occurring amino acid
  VARIANT 1009: note = Xaa can be any naturally occurring amino acid
  VARIANT 1014: note = Xaa can be any naturally occurring amino acid
  VARIANT 1019: note = Xaa can be any naturally occurring amino acid
  VARIANT 1024: note = Xaa can be any naturally occurring amino acid
  VARIANT 1029: note = Xaa can be any naturally occurring amino acid
  VARIANT 1034: note = Xaa can be any naturally occurring amino acid
  VARIANT 1039: note = Xaa can be any naturally occurring amino acid
  VARIANT 1044: note = Xaa can be any naturally occurring amino acid
  VARIANT 1049: note = Xaa can be any naturally occurring amino acid
  VARIANT 1054: note = Xaa can be any naturally occurring amino acid
  VARIANT 1059: note = Xaa can be any naturally occurring amino acid
  VARIANT 1064: note = Xaa can be any naturally occurring amino acid
  VARIANT 1069: note = Xaa can be any naturally occurring amino acid
  VARIANT 1074: note = Xaa can be any naturally occurring amino acid
  VARIANT 1079: note = Xaa can be any naturally occurring amino acid
  VARIANT 1084: note = Xaa can be any naturally occurring amino acid
  VARIANT 1089: note = Xaa can be any naturally occurring amino acid
  VARIANT 1094: note = Xaa can be any naturally occurring amino acid
  VARIANT 1099: note = Xaa can be any naturally occurring amino acid
  VARIANT 1104: note = Xaa can be any naturally occurring amino acid
  VARIANT 1109: note = Xaa can be any naturally occurring amino acid
  VARIANT 1114: note = Xaa can be any naturally occurring amino acid
  VARIANT 1119: note = Xaa can be any naturally occurring amino acid
  VARIANT 1124: note = Xaa can be any naturally occurring amino acid
  VARIANT 1129: note = Xaa can be any naturally occurring amino acid
  VARIANT 1134: note = Xaa can be any naturally occurring amino acid
  VARIANT 1139: note = Xaa can be any naturally occurring amino acid
  VARIANT 1144: note = Xaa can be any naturally occurring amino acid
  VARIANT 1149: note = Xaa can be any naturally occurring amino acid
  VARIANT 1154: note = Xaa can be any naturally occurring amino acid
  VARIANT 1159: note = Xaa can be any naturally occurring amino acid
  VARIANT 1164: note = Xaa can be any naturally occurring amino acid
  VARIANT 1169: note = Xaa can be any naturally occurring amino acid
  VARIANT 1174: note = Xaa can be any naturally occurring amino acid
  VARIANT 1179: note = Xaa can be any naturally occurring amino acid
  VARIANT 1184: note = Xaa can be any naturally occurring amino acid
  VARIANT 1189: note = Xaa can be any naturally occurring amino acid
  VARIANT 1194: note = Xaa can be any naturally occurring amino acid
  VARIANT 1199: note = Xaa can be any naturally occurring amino acid
  VARIANT 1204: note = Xaa can be any naturally occurring amino acid
  VARIANT 1209: note = Xaa can be any naturally occurring amino acid
  VARIANT 1214: note = Xaa can be any naturally occurring amino acid
  VARIANT 1219: note = Xaa can be any naturally occurring amino acid
  VARIANT 1224: note = Xaa can be any naturally occurring amino acid
  VARIANT 1229: note = Xaa can be any naturally occurring amino acid
  VARIANT 1234: note = Xaa can be any naturally occurring amino acid
  VARIANT 1239: note = Xaa can be any naturally occurring amino acid
  VARIANT 1244: note = Xaa can be any naturally occurring amino acid
  VARIANT 1249: note = Xaa can be any naturally occurring amino acid
  VARIANT 1254: note = Xaa can be any naturally occurring amino acid
  VARIANT 1259: note = Xaa can be any naturally occurring amino acid
  VARIANT 1264: note = Xaa can be any naturally occurring amino acid
  VARIANT 1269: note = Xaa can be any naturally occurring amino acid
  VARIANT 1274: note = Xaa can be any naturally occurring amino acid
  VARIANT 1279: note = Xaa can be any naturally occurring amino acid
  VARIANT 1284: note = Xaa can be any naturally occurring amino acid
  VARIANT 1289: note = Xaa can be any naturally occurring amino acid
  VARIANT 1294: note = Xaa can be any naturally occurring amino acid
  VARIANT 1299: note = Xaa can be any naturally occurring amino acid
  VARIANT 1304: note = Xaa can be any naturally occurring amino acid
  VARIANT 1309: note = Xaa can be any naturally occurring amino acid
  VARIANT 1314: note = Xaa can be any naturally occurring amino acid
  VARIANT 1319: note = Xaa can be any naturally occurring amino acid
  VARIANT 1324: note = Xaa can be any naturally occurring amino acid
  VARIANT 1329: note = Xaa can be any naturally occurring amino acid
  VARIANT 1334: note = Xaa can be any naturally occurring amino acid
  VARIANT 1339: note = Xaa can be any naturally occurring amino acid
  VARIANT 1344: note = Xaa can be any naturally occurring amino acid
  VARIANT 1349: note = Xaa can be any naturally occurring amino acid
  VARIANT 1354: note = Xaa can be any naturally occurring amino acid
  VARIANT 1359: note = Xaa can be any naturally occurring amino acid
  VARIANT 1364: note = Xaa can be any naturally occurring amino acid
  VARIANT 1369: note = Xaa can be any naturally occurring amino acid
  VARIANT 1374: note = Xaa can be any naturally occurring amino acid
  VARIANT 1379: note = Xaa can be any naturally occurring amino acid
  VARIANT 1384: note = Xaa can be any naturally occurring amino acid
  VARIANT 1389: note = Xaa can be any naturally occurring amino acid
  VARIANT 1394: note = Xaa can be any naturally occurring amino acid
  VARIANT 1399: note = Xaa can be any naturally occurring amino acid
  VARIANT 1404: note = Xaa can be any naturally occurring amino acid
  VARIANT 1409: note = Xaa can be any naturally occurring amino acid
  VARIANT 1414: note = Xaa can be any naturally occurring amino acid
  VARIANT 1419: note = Xaa can be any naturally occurring amino acid
  VARIANT 1424: note = Xaa can be any naturally occurring amino acid
  VARIANT 1429: note = Xaa can be any naturally occurring amino acid
  VARIANT 1434: note = Xaa can be any naturally occurring amino acid
  VARIANT 1439: note = Xaa can be any naturally occurring amino acid
  VARIANT 1444: note = Xaa can be any naturally occurring amino acid
  VARIANT 1449: note = Xaa can be any naturally occurring amino acid
  VARIANT 1454: note = Xaa can be any naturally occurring amino acid
  VARIANT 1459: note = Xaa can be any naturally occurring amino acid
  VARIANT 1464: note = Xaa can be any naturally occurring amino acid
  VARIANT 1469: note = Xaa can be any naturally occurring amino acid
  VARIANT 1474: note = Xaa can be any naturally occurring amino acid
  VARIANT 1479: note = Xaa can be any naturally occurring amino acid
  VARIANT 1484: note = Xaa can be any naturally occurring amino acid
  VARIANT 1489: note = Xaa can be any naturally occurring amino acid
  VARIANT 1494: note = Xaa can be any naturally occurring amino acid
  VARIANT 1499: note = Xaa can be any naturally occurring amino acid
  VARIANT 1504: note = Xaa can be any naturally occurring amino acid
  VARIANT 1509: note = Xaa can be any naturally occurring amino acid
  VARIANT 1514: note = Xaa can be any naturally occurring amino acid
  VARIANT 1519: note = Xaa can be any naturally occurring amino acid
  VARIANT 1524: note = Xaa can be any naturally occurring amino acid
  VARIANT 1529: note = Xaa can be any naturally occurring amino acid
  VARIANT 1534: note = Xaa can be any naturally occurring amino acid
  VARIANT 1539: note = Xaa can be any naturally occurring amino acid
  VARIANT 1544: note = Xaa can be any naturally occurring amino acid
  VARIANT 1549: note = Xaa can be any naturally occurring amino acid
  VARIANT 1554: note = Xaa can be any naturally occurring amino acid
  VARIANT 1559: note = Xaa can be any naturally occurring amino acid
  VARIANT 1564: note = Xaa can be any naturally occurring amino acid
  VARIANT 1569: note = Xaa can be any naturally occurring amino acid
  VARIANT 1574: note = Xaa can be any naturally occurring amino acid
  VARIANT 1579: note = Xaa can be any naturally occurring amino acid
  VARIANT 1584: note = Xaa can be any naturally occurring amino acid
  VARIANT 1589: note = Xaa can be any naturally occurring amino acid
  VARIANT 1594: note = Xaa can be any naturally occurring amino acid
  VARIANT 1599: note = Xaa can be any naturally occurring amino acid
  VARIANT 1604: note = Xaa can be any naturally occurring amino acid
  VARIANT 1609: note = Xaa can be any naturally occurring amino acid
  VARIANT 1614: note = Xaa can be any naturally occurring amino acid
  VARIANT 1619: note = Xaa can be any naturally occurring amino acid
  VARIANT 1624: note = Xaa can be any naturally occurring amino acid
  VARIANT 1629: note = Xaa can be any naturally occurring amino acid
  VARIANT 1634: note = Xaa can be any naturally occurring amino acid
  VARIANT 1639: note = Xaa can be any naturally occurring amino acid
  VARIANT 1644: note = Xaa can be any naturally occurring amino acid
  VARIANT 1649: note = Xaa can be any naturally occurring amino acid
  VARIANT 1654: note = Xaa can be any naturally occurring amino acid
  VARIANT 1659: note = Xaa can be any naturally occurring amino acid
  VARIANT 1664: note = Xaa can be any naturally occurring amino acid
  VARIANT 1669: note = Xaa can be any naturally occurring amino acid
  VARIANT 1674: note = Xaa can be any naturally occurring amino acid
  VARIANT 1679: note = Xaa can be any naturally occurring amino acid
  VARIANT 1684: note = Xaa can be any naturally occurring amino acid
  VARIANT 1689: note = Xaa can be any naturally occurring amino acid
  VARIANT 1694: note = Xaa can be any naturally occurring amino acid
  VARIANT 1699: note = Xaa can be any naturally occurring amino acid
  VARIANT 1704: note = Xaa can be any naturally occurring amino acid
  VARIANT 1709: note = Xaa can be any naturally occurring amino acid
  VARIANT 1714: note = Xaa can be any naturally occurring amino acid
  VARIANT 1719: note = Xaa can be any naturally occurring amino acid
  VARIANT 1724: note = Xaa can be any naturally occurring amino acid
  VARIANT 1729: note = Xaa can be any naturally occurring amino acid
  VARIANT 1734: note = Xaa can be any naturally occurring amino acid
  VARIANT 1739: note = Xaa can be any naturally occurring amino acid
  VARIANT 1744: note = Xaa can be any naturally occurring amino acid
  VARIANT 1749: note = Xaa can be any naturally occurring amino acid
  VARIANT 1754: note = Xaa can be any naturally occurring amino acid
  VARIANT 1759: note = Xaa can be any naturally occurring amino acid
  VARIANT 1764: note = Xaa can be any naturally occurring amino acid
  VARIANT 1769: note = Xaa can be any naturally occurring amino acid
  VARIANT 1774: note = Xaa can be any naturally occurring amino acid
  VARIANT 1779: note = Xaa can be any naturally occurring amino acid
  VARIANT 1784: note = Xaa can be any naturally occurring amino acid
  VARIANT 1789: note = Xaa can be any naturally occurring amino acid
  VARIANT 1794: note = Xaa can be any naturally occurring amino acid
  VARIANT 1799: note = Xaa can be any naturally occurring amino acid
  VARIANT 1804: note = Xaa can be any naturally occurring amino acid
  VARIANT 1809: note = Xaa can be any naturally occurring amino acid
  VARIANT 1814: note = Xaa can be any naturally occurring amino acid
  VARIANT 1819: note = Xaa can be any naturally occurring amino acid
  VARIANT 1824: note = Xaa can be any naturally occurring amino acid
  VARIANT 1829: note = Xaa can be any naturally occurring amino acid
  VARIANT 1834: note = Xaa can be any naturally occurring amino acid
  VARIANT 1839: note = Xaa can be any naturally occurring amino acid
  VARIANT 1844: note = Xaa can be any naturally occurring amino acid
  VARIANT 1849: note = Xaa can be any naturally occurring amino acid
  VARIANT 1854: note = Xaa can be any naturally occurring amino acid
  VARIANT 1859: note = Xaa can be any naturally occurring amino acid
  VARIANT 1864: note = Xaa can be any naturally occurring amino acid
  VARIANT 1869: note = Xaa can be any naturally occurring amino acid
  VARIANT 1874: note = Xaa can be any naturally occurring amino acid
  VARIANT 1879: note = Xaa can be any naturally occurring amino acid
  VARIANT 1884: note = Xaa can be any naturally occurring amino acid
  VARIANT 1889: note = Xaa can be any naturally occurring amino acid
  VARIANT 1894: note = Xaa can be any naturally occurring amino acid
  VARIANT 1899: note = Xaa can be any naturally occurring amino acid
  VARIANT 1904: note = Xaa can be any naturally occurring amino acid
  VARIANT 1909: note = Xaa can be any naturally occurring amino acid
  VARIANT 1914: note = Xaa can be any naturally occurring amino acid
  VARIANT 1919: note = Xaa can be any naturally occurring amino acid
  VARIANT 1924: note = Xaa can be any naturally occurring amino acid
  VARIANT 1929: note = Xaa can be any naturally occurring amino acid
  VARIANT 1934: note = Xaa can be any naturally occurring amino acid
  VARIANT 1939: note = Xaa can be any naturally occurring amino acid
  VARIANT 1944: note = Xaa can be any naturally occurring amino acid
  VARIANT 1949: note = Xaa can be any naturally occurring amino acid
  VARIANT 1954: note = Xaa can be any naturally occurring amino acid
  VARIANT 1959: note = Xaa can be any naturally occurring amino acid
  VARIANT 1964: note = Xaa can be any naturally occurring amino acid
  VARIANT 1969: note = Xaa can be any naturally occurring amino acid
  VARIANT 1974: note = Xaa can be any naturally occurring amino acid
  VARIANT 1979: note = Xaa can be any naturally occurring amino acid
  VARIANT 1984: note = Xaa can be any naturally occurring amino acid
  VARIANT 1989: note = Xaa can be any naturally occurring amino acid
  VARIANT 1994: note = Xaa can be any naturally occurring amino acid
  VARIANT 1999: note = Xaa can be any naturally occurring amino acid
  VARIANT 2004: note = Xaa can be any naturally occurring amino acid
  VARIANT 2009: note = Xaa can be any naturally occurring amino acid
  VARIANT 2014: note = Xaa can be any naturally occurring amino acid
  VARIANT 2019: note = Xaa can be any naturally occurring amino acid
  VARIANT 2024: note = Xaa can be any naturally occurring amino acid
  VARIANT 2029: note = Xaa can be any naturally occurring amino acid
  VARIANT 2034: note = Xaa can be any naturally occurring amino acid
  VARIANT 2039: note = Xaa can be any naturally occurring amino acid
  VARIANT 2044: note = Xaa can be any naturally occurring amino acid
  VARIANT 2049: note = Xaa can be any naturally occurring amino acid
  VARIANT 2054: note = Xaa can be any naturally occurring amino acid
  VARIANT 2059: note = Xaa can be any naturally occurring amino acid
  VARIANT 2064: note = Xaa can be any naturally occurring amino acid
  VARIANT 2069: note = Xaa can be any naturally occurring amino acid
  VARIANT 2074: note = Xaa can be any naturally occurring amino acid
  VARIANT 2079: note = Xaa can be any naturally occurring amino acid
  VARIANT 2084: note = Xaa can be any naturally occurring amino acid
  VARIANT 2089: note = Xaa can be any naturally occurring amino acid
  VARIANT 2094: note = Xaa can be any naturally occurring amino acid
  VARIANT 2099: note = Xaa can be any naturally occurring amino acid
  VARIANT 2104: note = Xaa can be any naturally occurring amino acid
  VARIANT 2109: note = Xaa can be any naturally occurring amino acid
  VARIANT 2114: note = Xaa can be any naturally occurring amino acid
  VARIANT 2119: note = Xaa can be any naturally occurring amino acid
  VARIANT 2124: note = Xaa can be any naturally occurring amino acid
  VARIANT 2129: note = Xaa can be any naturally occurring amino acid
  VARIANT 2134: note = Xaa can be any naturally occurring amino acid
  VARIANT 2139: note = Xaa can be any naturally occurring amino acid
  VARIANT 2144: note = Xaa can be any naturally occurring amino acid
  VARIANT 2149: note = Xaa can be any naturally occurring amino acid
  VARIANT 2154: note = Xaa can be any naturally occurring amino acid
  VARIANT 2159: note = Xaa can be any naturally occurring amino acid
  VARIANT 2164: note = Xaa can be any naturally occurring amino acid
  VARIANT 2169: note = Xaa can be any naturally occurring amino acid
  VARIANT 2174: note = Xaa can be any naturally occurring amino acid
  VARIANT 2179: note = Xaa can be any naturally occurring amino acid
  VARIANT 2184: note = Xaa can be any naturally occurring amino acid
  VARIANT 2189: note = Xaa can be any naturally occurring amino acid
  VARIANT 2194: note = Xaa can be any naturally occurring amino acid
  VARIANT 2199: note = Xaa can be any naturally occurring amino acid
  VARIANT 2204: note = Xaa can be any naturally occurring amino acid
  VARIANT 2209: note = Xaa can be any naturally occurring amino acid
  VARIANT 2214: note = Xaa can be any naturally occurring amino acid
  VARIANT 2219: note = Xaa can be any naturally occurring amino acid
  VARIANT 2224: note = Xaa can be any naturally occurring amino acid
  VARIANT 2229: note = Xaa can be any naturally occurring amino acid
  VARIANT 2234: note = Xaa can be any naturally occurring amino acid
  VARIANT 2239: note = Xaa can be any naturally occurring amino acid
  VARIANT 2244: note = Xaa can be any naturally occurring amino acid
  VARIANT 2249: note = Xaa can be any naturally occurring amino acid
  VARIANT 2254: note = Xaa can be any naturally occurring amino acid
  VARIANT 2259: note = Xaa can be any naturally occurring amino acid
  VARIANT 2264: note = Xaa can be any naturally occurring amino acid
  VARIANT 2269: note = Xaa can be any naturally occurring amino acid
  VARIANT 2274: note = Xaa can be any naturally occurring amino acid
  VARIANT 2279: note = Xaa can be any naturally occurring amino acid
  VARIANT 2284: note = Xaa can be any naturally occurring amino acid
  VARIANT 2289: note = Xaa can be any naturally occurring amino acid
  VARIANT 2294: note = Xaa can be any naturally occurring amino acid
  VARIANT 2299: note = Xaa can be any naturally occurring amino acid
  VARIANT 2304: note = Xaa can be any naturally occurring amino acid
  VARIANT 2309: note = Xaa can be any naturally occurring amino acid
  VARIANT 2314: note = Xaa can be any naturally occurring amino acid
  VARIANT 2319: note = Xaa can be any naturally occurring amino acid
  VARIANT 2324: note = Xaa can be any naturally occurring amino acid
  VARIANT 2329: note = Xaa can be any naturally occurring amino acid
  VARIANT 2334: note = Xaa can be any naturally occurring amino acid
  VARIANT 2339: note = Xaa can be any naturally occurring amino acid
  VARIANT 2344: note = Xaa can be any naturally occurring amino acid
  VARIANT 2349: note = Xaa can be any naturally occurring amino acid
  VARIANT 2354: note = Xaa can be any naturally occurring amino acid
  VARIANT 2359: note = Xaa can be any naturally occurring amino acid
  VARIANT 2364: note = Xaa can be any naturally occurring amino acid
  VARIANT 2369: note = Xaa can be any naturally occurring amino acid
  VARIANT 2374: note = Xaa can be any naturally occurring amino acid
  VARIANT 2379: note = Xaa can be any naturally occurring amino acid
  VARIANT 2384: note = Xaa can be any naturally occurring amino acid
  VARIANT 2389: note = Xaa can be any naturally occurring amino acid
  VARIANT 2394: note = Xaa can be any naturally occurring amino acid
  VARIANT 2399: note = Xaa can be any naturally occurring amino acid
  VARIANT 2404: note = Xaa can be any naturally occurring amino acid
  VARIANT 2409: note = Xaa can be any naturally occurring amino acid
  VARIANT 2414: note = Xaa can be any naturally occurring amino acid
  VARIANT 2419: note = Xaa can be any naturally occurring amino acid
  VARIANT 2424: note = Xaa can be any naturally occurring amino acid
  VARIANT 2429: note = Xaa can be any naturally occurring amino acid
  VARIANT 2434: note = Xaa can be any naturally occurring amino acid
  VARIANT 2439: note = Xaa can be any naturally occurring amino acid
  VARIANT 2444: note = Xaa can be any naturally occurring amino acid
  VARIANT 2449: note = Xaa can be any naturally occurring amino acid
  VARIANT 2454: note = Xaa can be any naturally occurring amino acid
  VARIANT 2459: note = Xaa can be any naturally occurring amino acid
  VARIANT 2464: note = Xaa can be any naturally occurring amino acid
  VARIANT 2469: note = Xaa can be any naturally occurring amino acid
  VARIANT 2474: note = Xaa can be any naturally occurring amino acid
  VARIANT 2479: note = Xaa can be any naturally occurring amino acid
  VARIANT 2484: note = Xaa can be any naturally occurring amino acid
  VARIANT 2489: note = Xaa can be any naturally occurring amino acid
  VARIANT 2494: note = Xaa can be any naturally occurring amino acid
  VARIANT 2499: note = Xaa can be any naturally occurring amino acid
VPGXGVPGXGVPGXGVPGXGVPGXGVPGXGVPGXGVPGXGVPGXGVPGXGVPGXGVPGXGVPGXGVPGXGVPGXGVPGXGVPGXGVPGXGVPGXGVPGXGVPGXGVPGXGVPGXGVPGXGVPGXGVPGXGVPGXGVPGXGVPGXGVPGXGVPGXGVPGXGVPGXGVPGXGVPGXGVPGXGVPGXGVPGXGVPGXGVPGXGVPGXGVPGXGVPGXGVPGXGVPGXGVPGXGVPGXGVPGXGVPGXGVPGXGVPGXGVPGXGVPGXGVPGXGVPGXGVPGXGVPGXGVPGXGVPGXGVPGXGVPGXGVPGXGVPGXGVPGXGVPGXGVPGXGVPGXGVPGXGVPGXGVPGXGVPGXGVPGXGVPGXGVPGXGVPGXGVPGXGVPGXGVPGXGVPGXGVPGXGVPGXGVPGXGVPGXGVPGXGVPGXGVPGXGVPGXGVPGXGVPGXGVPGXGVPGXGVPGXGVPGXGVPGXGVPGXGVPGXGVPGXGVPGXGVPGXGVPGXGVPGXGVPGXGVPGXGVPGXGVPGXGVPGXGVPGXGVPGXGVPGXGVPGXGVPGXGVPGXGVPGXGVPGXGVPGXGVPGXGVPGXGVPGXGVPGXGVPGXGVPGXGVPGXGVPGXGVPGXGVPGXGVPGXGVPGXGVPGXGVPGXGVPGXGVPGXGVPGXGVPGXGVPGXGVPGXGVPGXGVPGXGVPGXGVPGXGVPGXGVPGXGVPGXGVPGXGVPGXGVPGXGVPGXGVPGXGVPGXGVPGXGVPGXGVPGXGVPGXGVPGXGVPGXGVPGXGVPGXGVPGXGVPGXGVPGXGVPGXGVPGXGVPGXGVPGXGVPGXGVPGXGVPGXGVPGXGVPGXGVPGXGVPGXGVPGXGVPGXGVPGXGVPGXGVPGXGVPGXGVPGXGVPGXGVPGXGVPGXGVPGXGVPGXGVPGXGVPGXGVPGXGVPGXGVPGXGVPGXGVPGXGVPGXGVPGXGVPGXGVPGXGVPGXGVPGXGVPGXGVPGXGVPGXGVPGXGVPGXGVPGXGVPGXGVPGXGVPGXGVPGXGVPGXGVPGXGVPGXGVPGXGVPGXGVPGXGVPGXGVPGXGVPGXGVPGXGVPGXGVPGXGVPGXGVPGXGVPGXGVPGXGVPGXGVPGXGVPGXGVPGXGVPGXGVPGXGVPGXGVPGXGVPGXGVPGXGVPGXGVPGXGVPGXGVPGXGVPGXGVPGXGVPGXGVPGXGVPGXGVPGXGVPGXGVPGXGVPGXGVPGXGVPGXGVPGXGVPGXGVPGXGVPGXGVPGXGVPGXGVPGXGVPGXGVPGXGVPGXGVPGXGVPGXGVPGXGVPGXGVPGXGVPGXGVPGXGVPGXGVPGXGVPGXGVPGXGVPGXGVPGXGVPGXGVPGXGVPGXGVPGXGVPGXGVPGXGVPGXGVPGXGVPGXGVPGXGVPGXGVPGXGVPGXGVPGXGVPGXGVPGXGVPGXGVPGXGVPGXGVPGXGVPGXGVPGXGVPGXGVPGXGVPGXGVPGXGVPGXGVPGXGVPGXGVPGXGVPGXGVPGXGVPGXGVPGXGVPGXGVPGXGVPGXGVPGXGVPGXGVPGXGVPGXGVPGXGVPGXGVPGXGVPGXGVPGXGVPGXGVPGXGVPGXGVPGXGVPGXGVPGXGVPGXGVPGXGVPGXGVPGXGVPGXGVPGXGVPGXGVPGXGVPGXGVPGXGVPGXGVPGXGVPGXGVPGXGVPGXGVPGXGVPGXGVPGXGVPGXGVPGXGVPGXGVPGXGVPGXGVPGXGVPGXGVPGXGVPGXGVPGXGVPGXGVPGXGVPGXGVPGXGVPGXGVPGXGVPGXGVPGXGVPGXGVPGXGVPGXGVPGXGVPGXGVPGXGVPGXGVPGXGVPGXGVPGXGVPGXGVPGXGVPGXGVPGXGVPGXGVPGXGVPGXGVPGXGVPGXGVPGXGVPGXGVPGXGVPGXGVPGXGVPGXGVPGXGVPGXGVPGXGVPGXGVPGXGVPGXGVPGXGVPGXGVPGXGVPGXGVPGXGVPGXGVPGXGVPGXGVPGXGVPGXGVPGXGVPGXGVPGXGVPGXGVPGXGVPGXGVPGXGVPGXGVPGXGVPGXGVPGXGVPGXGVPGXGVPGXGVPGXGVPGXGVPGXGVPGXGVPGXGVPGXGVPGXGVPGXGVPGXGVPGXGVPGXGVPGXGVPGXGVPGXGVPGXGVPGXGVPGXGVPGXGVPGXGVPGXGVPGXGVPGXGVPGXGVPGXGVPGXGVPGXGVPGXGVPGXGVPGXGVPGXGVPGXGVPGXGVPGXGVPGXGVPGXGVPGXGVPGXGVPGXGVPGXGVPGXGVPGXGVPGXGVPGXGVPGXGVPGXGVPGXGVPGXGVPGXGVPGXGVPGXGVPGXGVPGXGVPGXGVPGXGVPGXGVPGXGVPGXGVPGXGVPGXGVPGXGVPGXGVPGXGVPGXGVPGXGVPGXGVPGXGVPGXGVPGXGVPGXGVPGXGVPGXGVPGXGVPGXGVPGXGVPGXGVPGXGVPGXGVPGXGVPGXGVPGXGVPGXGVPGXGVPGXGVPGXGVPGXGVPGXGVPGXGVPGXG

SEQ ID NO: 11 - protein, 2500 aa, synthetic construct
  REGION 1..2500: note = elastin-like polypeptide
  VARIANT 6..2500: note = May be present or absent in groups of the repeat unit Gly Val GlyVal Pro
GVGVPGVGVPGVGVPGVGVPGVGVPGVGVPGVGVPGVGVPGVGVPGVGVPGVGVPGVGVPGVGVPGVGVPGVGVPGVGVPGVGVPGVGVPGVGVPGVGVPGVGVPGVGVPGVGVPGVGVPGVGVPGVGVPGVGVPGVGVPGVGVPGVGVPGVGVPGVGVPGVGVPGVGVPGVGVPGVGVPGVGVPGVGVPGVGVPGVGVPGVGVPGVGVPGVGVPGVGVPGVGVPGVGVPGVGVPGVGVPGVGVPGVGVPGVGVPGVGVPGVGVPGVGVPGVGVPGVGVPGVGVPGVGVPGVGVPGVGVPGVGVPGVGVPGVGVPGVGVPGVGVPGVGVPGVGVPGVGVPGVGVPGVGVPGVGVPGVGVPGVGVPGVGVPGVGVPGVGVPGVGVPGVGVPGVGVPGVGVPGVGVPGVGVPGVGVPGVGVPGVGVPGVGVPGVGVPGVGVPGVGVPGVGVPGVGVPGVGVPGVGVPGVGVPGVGVPGVGVPGVGVPGVGVPGVGVPGVGVPGVGVPGVGVPGVGVPGVGVPGVGVPGVGVPGVGVPGVGVPGVGVPGVGVPGVGVPGVGVPGVGVPGVGVPGVGVPGVGVPGVGVPGVGVPGVGVPGVGVPGVGVPGVGVPGVGVPGVGVPGVGVPGVGVPGVGVPGVGVPGVGVPGVGVPGVGVPGVGVPGVGVPGVGVPGVGVPGVGVPGVGVPGVGVPGVGVPGVGVPGVGVPGVGVPGVGVPGVGVPGVGVPGVGVPGVGVPGVGVPGVGVPGVGVPGVGVPGVGVPGVGVPGVGVPGVGVPGVGVPGVGVPGVGVPGVGVPGVGVPGVGVPGVGVPGVGVPGVGVPGVGVPGVGVPGVGVPGVGVPGVGVPGVGVPGVGVPGVGVPGVGVPGVGVPGVGVPGVGVPGVGVPGVGVPGVGVPGVGVPGVGVPGVGVPGVGVPGVGVPGVGVPGVGVPGVGVPGVGVPGVGVPGVGVPGVGVPGVGVPGVGVPGVGVPGVGVPGVGVPGVGVPGVGVPGVGVPGVGVPGVGVPGVGVPGVGVPGVGVPGVGVPGVGVPGVGVPGVGVPGVGVPGVGVPGVGVPGVGVPGVGVPGVGVPGVGVPGVGVPGVGVPGVGVPGVGVPGVGVPGVGVPGVGVPGVGVPGVGVPGVGVPGVGVPGVGVPGVGVPGVGVPGVGVPGVGVPGVGVPGVGVPGVGVPGVGVPGVGVPGVGVPGVGVPGVGVPGVGVPGVGVPGVGVPGVGVPGVGVPGVGVPGVGVPGVGVPGVGVPGVGVPGVGVPGVGVPGVGVPGVGVPGVGVPGVGVPGVGVPGVGVPGVGVPGVGVPGVGVPGVGVPGVGVPGVGVPGVGVPGVGVPGVGVPGVGVPGVGVPGVGVPGVGVPGVGVPGVGVPGVGVPGVGVPGVGVPGVGVPGVGVPGVGVPGVGVPGVGVPGVGVPGVGVPGVGVPGVGVPGVGVPGVGVPGVGVPGVGVPGVGVPGVGVPGVGVPGVGVPGVGVPGVGVPGVGVPGVGVPGVGVPGVGVPGVGVPGVGVPGVGVPGVGVPGVGVPGVGVPGVGVPGVGVPGVGVPGVGVPGVGVPGVGVPGVGVPGVGVPGVGVPGVGVPGVGVPGVGVPGVGVPGVGVPGVGVPGVGVPGVGVPGVGVPGVGVPGVGVPGVGVPGVGVPGVGVPGVGVPGVGVPGVGVPGVGVPGVGVPGVGVPGVGVPGVGVPGVGVPGVGVPGVGVPGVGVPGVGVPGVGVPGVGVPGVGVPGVGVPGVGVPGVGVPGVGVPGVGVPGVGVPGVGVPGVGVPGVGVPGVGVPGVGVPGVGVPGVGVPGVGVPGVGVPGVGVPGVGVPGVGVPGVGVPGVGVPGVGVPGVGVPGVGVPGVGVPGVGVPGVGVPGVGVPGVGVPGVGVPGVGVPGVGVPGVGVPGVGVPGVGVPGVGVPGVGVPGVGVPGVGVPGVGVPGVGVPGVGVPGVGVPGVGVPGVGVPGVGVPGVGVPGVGVPGVGVPGVGVPGVGVPGVGVPGVGVPGVGVPGVGVPGVGVPGVGVPGVGVPGVGVPGVGVPGVGVPGVGVPGVGVPGVGVPGVGVPGVGVPGVGVPGVGVPGVGVPGVGVPGVGVPGVGVPGVGVPGVGVPGVGVPGVGVPGVGVPGVGVPGVGVPGVGVPGVGVPGVGVPGVGVPGVGVPGVGVPGVGVPGVGVPGVGVPGVGVPGVGVPGVGVPGVGVPGVGVPGVGVPGVGVPGVGVPGVGVPGVGVPGVGVPGVGVPGVGVPGVGVPGVGVPGVGVPGVGVPGVGVPGVGVPGVGVPGVGVPGVGVPGVGVPGVGVPGVGVPGVGVPGVGVPGVGVPGVGVPGVGVPGVGVPGVGVPGVGVPGVGVPGVGVPGVGVPGVGVPGVGVPGVGVPGVGVPGVGVPGVGVPGVGVPGVGVPGVGVPGVGVPGVGVPGVGVPGVGVPGVGVPGVGVPGVGVPGVGVPGVGVPGVGVPGVGVPGVGVPGVGVPGVGVPGVGVPGVGVPGVGVPGVGVPGVGVPGVGVPGVGVPGVGVPGVGVPGVGVPGVGVP

SEQ ID NO: 12 - protein, 625 aa, synthetic construct
  REGION 1..625: note = elastin-like polypeptide
  VARIANT 101..625: note = May be present or absent in groups of the repeat unit Gly Val GlyVal Pro Gly Leu Gly Val Pro Gly Val Gly Val Pro Gly Leu Gly ValPro Gly Val Gly Val Pro
GVGVPGLGVPGVGVPGLGVPGVGVPGVGVPGLGVPGVGVPGLGVPGVGVPGVGVPGLGVPGVGVPGLGVPGVGVPGVGVPGLGVPGVGVPGLGVPGVGVPGVGVPGLGVPGVGVPGLGVPGVGVPGVGVPGLGVPGVGVPGLGVPGVGVPGVGVPGLGVPGVGVPGLGVPGVGVPGVGVPGLGVPGVGVPGLGVPGVGVPGVGVPGLGVPGVGVPGLGVPGVGVPGVGVPGLGVPGVGVPGLGVPGVGVPGVGVPGLGVPGVGVPGLGVPGVGVPGVGVPGLGVPGVGVPGLGVPGVGVPGVGVPGLGVPGVGVPGLGVPGVGVPGVGVPGLGVPGVGVPGLGVPGVGVPGVGVPGLGVPGVGVPGLGVPGVGVPGVGVPGLGVPGVGVPGLGVPGVGVPGVGVPGLGVPGVGVPGLGVPGVGVPGVGVPGLGVPGVGVPGLGVPGVGVPGVGVPGLGVPGVGVPGLGVPGVGVPGVGVPGLGVPGVGVPGLGVPGVGVPGVGVPGLGVPGVGVPGLGVPGVGVPGVGVPGLGVPGVGVPGLGVPGVGVPGVGVPGLGVPGVGVPGLGVPGVGVPGVGVPGLGVPGVGVPGLGVPGVGVPGVGVPGLGVPGVGVPGLGVPGVGVP

SEQ ID NO: 13 - protein, 625 aa, synthetic construct
  REGION 1..625: note = elastin-like polypeptide
  VARIANT 101..625: note = May be present or absent in groups of the repeat unit Gly Val GlyVal Pro Gly Val Gly Val Pro Gly Ala Gly Val Pro Gly Val Gly ValPro Gly Val Gly Val Pro
GVGVPGVGVPGAGVPGVGVPGVGVPGVGVPGVGVPGAGVPGVGVPGVGVPGVGVPGVGVPGAGVPGVGVPGVGVPGVGVPGVGVPGAGVPGVGVPGVGVPGVGVPGVGVPGAGVPGVGVPGVGVPGVGVPGVGVPGAGVPGVGVPGVGVPGVGVPGVGVPGAGVPGVGVPGVGVPGVGVPGVGVPGAGVPGVGVPGVGVPGVGVPGVGVPGAGVPGVGVPGVGVPGVGVPGVGVPGAGVPGVGVPGVGVPGVGVPGVGVPGAGVPGVGVPGVGVPGVGVPGVGVPGAGVPGVGVPGVGVPGVGVPGVGVPGAGVPGVGVPGVGVPGVGVPGVGVPGAGVPGVGVPGVGVPGVGVPGVGVPGAGVPGVGVPGVGVPGVGVPGVGVPGAGVPGVGVPGVGVPGVGVPGVGVPGAGVPGVGVPGVGVPGVGVPGVGVPGAGVPGVGVPGVGVPGVGVPGVGVPGAGVPGVGVPGVGVPGVGVPGVGVPGAGVPGVGVPGVGVPGVGVPGVGVPGAGVPGVGVPGVGVPGVGVPGVGVPGAGVPGVGVPGVGVPGVGVPGVGVPGAGVPGVGVPGVGVPGVGVPGVGVPGAGVPGVGVPGVGVPGVGVPGVGVPGAGVPGVGVPGVGVP

SEQ ID NO: 14 - protein, 625 aa, synthetic construct
  REGION 1..625: note = elastin-like polypeptide
  VARIANT 101..625: note = May be present or absent in groups of the repeat unit Gly Val GlyVal Pro Gly Trp Gly Val Pro Gly Val Gly Val Pro Gly Trp Gly ValPro Gly Val Gly Val Pro
GVGVPGWGVPGVGVPGWGVPGVGVPGVGVPGWGVPGVGVPGWGVPGVGVPGVGVPGWGVPGVGVPGWGVPGVGVPGVGVPGWGVPGVGVPGWGVPGVGVPGVGVPGWGVPGVGVPGWGVPGVGVPGVGVPGWGVPGVGVPGWGVPGVGVPGVGVPGWGVPGVGVPGWGVPGVGVPGVGVPGWGVPGVGVPGWGVPGVGVPGVGVPGWGVPGVGVPGWGVPGVGVPGVGVPGWGVPGVGVPGWGVPGVGVPGVGVPGWGVPGVGVPGWGVPGVGVPGVGVPGWGVPGVGVPGWGVPGVGVPGVGVPGWGVPGVGVPGWGVPGVGVPGVGVPGWGVPGVGVPGWGVPGVGVPGVGVPGWGVPGVGVPGWGVPGVGVPGVGVPGWGVPGVGVPGWGVPGVGVPGVGVPGWGVPGVGVPGWGVPGVGVPGVGVPGWGVPGVGVPGWGVPGVGVPGVGVPGWGVPGVGVPGWGVPGVGVPGVGVPGWGVPGVGVPGWGVPGVGVPGVGVPGWGVPGVGVPGWGVPGVGVPGVGVPGWGVPGVGVPGWGVPGVGVPGVGVPGWGVPGVGVPGWGVPGVGVPGVGVPGWGVPGVGVPGWGVPGVGVPGVGVPGWGVPGVGVPGWGVPGVGVP

SEQ ID NO: 15 - protein, 1125 aa, synthetic construct
  REGION 1..1125: note = elastin-like polypeptide
  VARIANT 181..1125: note = May be present or absent in groups of the repeat unit Gly Val GlyVal Pro Gly Val Gly Val Pro Gly Val Gly Val Pro Gly Val Gly ValPro Gly Val Gly Val Pro Gly Val Gly Val Pro Gly Glu Gly Val ProGly Phe Gly Val Pro Gly Val Gly Val Pro
GVGVPGVGVPGVGVPGVGVPGVGVPGVGVPGEGVPGFGVPGVGVPGVGVPGVGVPGVGVPGVGVPGVGVPGVGVPGEGVPGFGVPGVGVPGVGVPGVGVPGVGVPGVGVPGVGVPGVGVPGEGVPGFGVPGVGVPGVGVPGVGVPGVGVPGVGVPGVGVPGVGVPGEGVPGFGVPGVGVPGVGVPGVGVPGVGVPGVGVPGVGVPGVGVPGEGVPGFGVPGVGVPGVGVPGVGVPGVGVPGVGVPGVGVPGVGVPGEGVPGFGVPGVGVPGVGVPGVGVPGVGVPGVGVPGVGVPGVGVPGEGVPGFGVPGVGVPGVGVPGVGVPGVGVPGVGVPGVGVPGVGVPGEGVPGFGVPGVGVPGVGVPGVGVPGVGVPGVGVPGVGVPGVGVPGEGVPGFGVPGVGVPGVGVPGVGVPGVGVPGVGVPGVGVPGVGVPGEGVPGFGVPGVGVPGVGVPGVGVPGVGVPGVGVPGVGVPGVGVPGEGVPGFGVPGVGVPGVGVPGVGVPGVGVPGVGVPGVGVPGVGVPGEGVPGFGVPGVGVPGVGVPGVGVPGVGVPGVGVPGVGVPGVGVPGEGVPGFGVPGVGVPGVGVPGVGVPGVGVPGVGVPGVGVPGVGVPGEGVPGFGVPGVGVPGVGVPGVGVPGVGVPGVGVPGVGVPGVGVPGEGVPGFGVPGVGVPGVGVPGVGVPGVGVPGVGVPGVGVPGVGVPGEGVPGFGVPGVGVPGVGVPGVGVPGVGVPGVGVPGVGVPGVGVPGEGVPGFGVPGVGVPGVGVPGVGVPGVGVPGVGVPGVGVPGVGVPGEGVPGFGVPGVGVPGVGVPGVGVPGVGVPGVGVPGVGVPGVGVPGEGVPGFGVPGVGVPGVGVPGVGVPGVGVPGVGVPGVGVPGVGVPGEGVPGFGVPGVGVPGVGVPGVGVPGVGVPGVGVPGVGVPGVGVPGEGVPGFGVPGVGVPGVGVPGVGVPGVGVPGVGVPGVGVPGVGVPGEGVPGFGVPGVGVPGVGVPGVGVPGVGVPGVGVPGVGVPGVGVPGEGVPGFGVPGVGVPGVGVPGVGVPGVGVPGVGVPGVGVPGVGVPGEGVPGFGVPGVGVPGVGVPGVGVPGVGVPGVGVPGVGVPGVGVPGEGVPGFGVPGVGVP

SEQ ID NO: 16 - protein, 1125 aa, synthetic construct
  REGION 1..1125: note = elastin-like polypeptide
  VARIANT 181..1125: note = May be present or absent in groups of the repeat unit Gly Val GlyVal Pro Gly Val Gly Val Pro Gly Val Gly Val Pro Gly Val Gly ValPro Gly Val Gly Val Pro Gly Val Gly Val Pro Gly Lys Gly Val ProGly Phe Gly Val Pro Gly Val Gly Val Pro
GVGVPGVGVPGVGVPGVGVPGVGVPGVGVPGKGVPGFGVPGVGVPGVGVPGVGVPGVGVPGVGVPGVGVPGVGVPGKGVPGFGVPGVGVPGVGVPGVGVPGVGVPGVGVPGVGVPGVGVPGKGVPGFGVPGVGVPGVGVPGVGVPGVGVPGVGVPGVGVPGVGVPGKGVPGFGVPGVGVPGVGVPGVGVPGVGVPGVGVPGVGVPGVGVPGKGVPGFGVPGVGVPGVGVPGVGVPGVGVPGVGVPGVGVPGVGVPGKGVPGFGVPGVGVPGVGVPGVGVPGVGVPGVGVPGVGVPGVGVPGKGVPGFGVPGVGVPGVGVPGVGVPGVGVPGVGVPGVGVPGVGVPGKGVPGFGVPGVGVPGVGVPGVGVPGVGVPGVGVPGVGVPGVGVPGKGVPGFGVPGVGVPGVGVPGVGVPGVGVPGVGVPGVGVPGVGVPGKGVPGFGVPGVGVPGVGVPGVGVPGVGVPGVGVPGVGVPGVGVPGKGVPGFGVPGVGVPGVGVPGVGVPGVGVPGVGVPGVGVPGVGVPGKGVPGFGVPGVGVPGVGVPGVGVPGVGVPGVGVPGVGVPGVGVPGKGVPGFGVPGVGVPGVGVPGVGVPGVGVPGVGVPGVGVPGVGVPGKGVPGFGVPGVGVPGVGVPGVGVPGVGVPGVGVPGVGVPGVGVPGKGVPGFGVPGVGVPGVGVPGVGVPGVGVPGVGVPGVGVPGVGVPGKGVPGFGVPGVGVPGVGVPGVGVPGVGVPGVGVPGVGVPGVGVPGKGVPGFGVPGVGVPGVGVPGVGVPGVGVPGVGVPGVGVPGVGVPGKGVPGFGVPGVGVPGVGVPGVGVPGVGVPGVGVPGVGVPGVGVPGKGVPGFGVPGVGVPGVGVPGVGVPGVGVPGVGVPGVGVPGVGVPGKGVPGFGVPGVGVPGVGVPGVGVPGVGVPGVGVPGVGVPGVGVPGKGVPGFGVPGVGVPGVGVPGVGVPGVGVPGVGVPGVGVPGVGVPGKGVPGFGVPGVGVPGVGVPGVGVPGVGVPGVGVPGVGVPGVGVPGKGVPGFGVPGVGVPGVGVPGVGVPGVGVPGVGVPGVGVPGVGVPGKGVPGFGVPGVGVPGVGVPGVGVPGVGVPGVGVPGVGVPGVGVPGKGVPGFGVPGVGVP

SEQ ID NO: 17 - protein, 625 aa, synthetic construct
  REGION 1..625: note = elastin-like polypeptide
  VARIANT 26..625: note = May be present or absent in groups of the repeat unit Gly Ala GlyVal Pro Gly Val Gly Val Pro Gly Ala Gly Val Pro Gly Val Gly ValPro Gly Ala Gly Val Pro
GAGVPGVGVPGAGVPGVGVPGAGVPGAGVPGVGVPGAGVPGVGVPGAGVPGAGVPGVGVPGAGVPGVGVPGAGVPGAGVPGVGVPGAGVPGVGVPGAGVPGAGVPGVGVPGAGVPGVGVPGAGVPGAGVPGVGVPGAGVPGVGVPGAGVPGAGVPGVGVPGAGVPGVGVPGAGVPGAGVPGVGVPGAGVPGVGVPGAGVPGAGVPGVGVPGAGVPGVGVPGAGVPGAGVPGVGVPGAGVPGVGVPGAGVPGAGVPGVGVPGAGVPGVGVPGAGVPGAGVPGVGVPGAGVPGVGVPGAGVPGAGVPGVGVPGAGVPGVGVPGAGVPGAGVPGVGVPGAGVPGVGVPGAGVPGAGVPGVGVPGAGVPGVGVPGAGVPGAGVPGVGVPGAGVPGVGVPGAGVPGAGVPGVGVPGAGVPGVGVPGAGVPGAGVPGVGVPGAGVPGVGVPGAGVPGAGVPGVGVPGAGVPGVGVPGAGVPGAGVPGVGVPGAGVPGVGVPGAGVPGAGVPGVGVPGAGVPGVGVPGAGVPGAGVPGVGVPGAGVPGVGVPGAGVPGAGVPGVGVPGAGVPGVGVPGAGVPGAGVPGVGVPGAGVPGVGVPGAGVPGAGVPGVGVPGAGVPGVGVPGAGVP

SEQ ID NO: 18 - protein, 100 aa, synthetic construct
  REGION 1..100: note = Linker peptide
  VARIANT 6..100: note = May be present or absent in groups of the repeat unit Glu Ala AlaAla Lys
EAAAKEAAAKEAAAKEAAAKEAAAKEAAAKEAAAKEAAAKEAAAKEAAAKEAAAKEAAAKEAAAKEAAAKEAAAKEAAAKEAAAKEAAAKEAAAKEAAAK

SEQ ID NO: 19 - protein, 150 aa, synthetic construct
  REGION 1..150: note = Linker peptide
  VARIANT 6..150: note = May be present or absent in groups of the repeat unit Gly Gly GlyGly Ser
GGGGSGGGGSGGGGSGGGGSGGGGSGGGGSGGGGSGGGGSGGGGSGGGGSGGGGSGGGGSGGGGSGGGGSGGGGSGGGGSGGGGSGGGGSGGGGSGGGGSGGGGSGGGGSGGGGSGGGGSGGGGSGGGGSGGGGSGGGGSGGGGSGGGGS

SEQ ID NO: 20 - protein, 200 aa, synthetic construct
  REGION 1..200: note = Linker peptide
  VARIANT 5..100: note = May be present or absent in groups of the repeat unit Ser Gly GlyGly
SGGGSGGGSGGGSGGGSGGGSGGGSGGGSGGGSGGGSGGGSGGGSGGGSGGGSGGGSGGGSGGGSGGGSGGGSGGGSGGGSGGGSGGGSGGGSGGGSGGGSGGGSGGGSGGGSGGGSGGGSGGGSGGGSGGGSGGGSGGGSGGGSGGGSGGGSGGGSGGGSGGGSGGGSGGGSGGGSGGGSGGGSGGGSGGGSGGGSGGG

SEQ ID NO: 21 - protein, 80 aa, synthetic construct
  REGION 1..80: note = Linker peptide
  VARIANT 5..80: note = May be present or absent in groups of the repeat unit Gly Gly Gly Ser
GGGSGGGSGGGSGGGSGGGSGGGSGGGSGGGSGGGSGGGSGGGSGGGSGGGSGGGSGGGSGGGSGGGSGGGSGGGSGGGS

SEQ ID NO: 22 - protein, 18 aa, synthetic construct
  REGION 1..18: note = Linker peptide
KESGSVSSEQLAQFRSLD

SEQ ID NO: 23 - protein, 14 aa, synthetic construct
  REGION 1..14: note = Linker peptide
EGKSSGSGSESKST

SEQ ID NO: 24 - protein, 7 aa, synthetic construct
  REGION 1..7: note = AAV linker
PRKNRPP

SEQ ID NO: 25 - protein, 5 aa, synthetic construct
  REGION 1..5: note = AAV linker
VDYPP

SEQ ID NO: 26 - protein, 5 aa, synthetic construct
  REGION 1..5: note = AAV linker
NNKPP

SEQ ID NO: 27 - protein, 5 aa, synthetic construct
  REGION 1..5: note = AAV linker
INKPP

SEQ ID NO: 28 - protein, 90 aa, synthetic construct
  REGION 1..90: note = Human PKD1
SAGESVQITLPKNEVQLNAYVLQEPPKGETYTYDWQLITHPRDYSGEMEGKHSQILKLSKLTPGLYEFKVIVEGQNAHGEGYVNVTVKPE

SEQ ID NO: 29 - protein, 90 aa, synthetic construct
  REGION 1..90: note = Human PKD2
IAIVSPQFQEISLPTTSTVIDGSQSTDDDKIVQYHWEELKGPLREEKISEDTAILKLSKLVPGNYTFSLTVVDSDGATNSTTANLTVNKA

SEQ ID NO: 30 - protein, 91 aa, synthetic construct
  REGION 1..91: note = Human PKD3
VANAGPNQVITLPQNSITLFGNQSTDDHGITSYEWSLSPSSKGKVVEMQGVRTPTLQLSAMQEGDYTYQLTVTDTIGQQATAQVTVIVQPE

SEQ ID NO: 31 - protein, 89 aa, synthetic construct
  REGION 1..89: note = Human PKD4
QADAGPDKELTLPVDSTTLDGSKSSDDQKIISYLWEKTQGPDGVQLENANSSVATVTGLQVGTYVFTLTVKDERNLQSQSSVNVIVKEE

SEQ ID NO: 32 - protein, 92 aa, synthetic construct
  REGION 1..92: note = Human PKD5
IAKITGNVVITLPTSTAELDGSKSSDDKGIVSYLWTRDEGSPAAGEVLNHSDHHPILFLSNLVEGTYTFHLKVTDAKGESDTDRTTVEVKPD

SEQ ID NO: 33 - protein, 477 aa, Homo sapiens
VSAGESVQITLPKNEVQLNAYVLQEPPKGETYTYDWQLITHPRDYSGEMEGKHSQILKLSKLTPGLYEFKVIVEGQNAHGEGYVNVTVKPEPRKNRPPIAIVSPQFQEISLPTTSTVIDGSQSTDDDKIVQYHWEELKGPLREEKISEDTAILKLSKLVPGNYTFSLTVVDSDGATNSTTANLTVNKAVDYPPVANAGPNQVITLPQNSITLFGNQSTDDHGITSYEWSLSPSSKGKVVEMQGVRTPTLQLSAMQEGDYTYQLTVTDTIGQQATAQVTVIVQPENNKPPQADAGPDKELTLPVDSTTLDGSKSSDDQKIISYLWEKTQGPDGVQLENANSSVATVTGLQVGTYVFTLTVKDERNLQSQSSVNVIVKEEINKPPIAKITGNVVITLPTSTAELDGSKSSDDKGIVSYLWTRDEGSPAAGEVLNHSDHHPILFLSNLVEGTYTFHLKVTDAKGESDTDRTTVEVKPDPR

SEQ ID NO: 34 - protein, 478 aa, Homo sapiens
MVSAGESVQITLPKNEVQLNAYVLQEPPKGETYTYDWQLITHPRDYSGEMEGKHSQILKLSKLTPGLYEFKVIVEGQNAHGEGYVNVTVKPEPRKNRPPIAIVSPQFQEISLPTTSTVIDGSQSTDDDKIVQYHWEELKGPLREEKISEDTAILKLSKLVPGNYTFSLTVVDSDGATNSTTANLTVNKAVDYPPVANAGPNQVITLPQNSITLFGNQSTDDHGITSYEWSLSPSSKGKVVEMQGVRTPTLQLSAMQEGDYTYQLTVTDTIGQQATAQVTVIVQPENNKPPQADAGPDKELTLPVDSTTLDGSKSSDDQKIISYLWEKTQGPDGVQLENANSSVATVTGLQVGTYVFTLTVKDERNLQSQSSVNVIVKEEINKPPIAKITGNVVITLPTSTAELDGSKSSDDKGIVSYLWTRDEGSPAAGEVLNHSDHHPILFLSNLVEGTYTFHLKVTDAKGESDTDRTTVEVKPDPR

SEQ ID NO: 35 - protein, 1049 aa, Homo sapiens
MEKRLGVKPNPASWILSGYYWQTSAKWLRSLYLFYTCFCFSVLWLSTDASESRCQQGKTQFGVGLRSGGENHLWLLEGTPSLQSCWAACCQDSACHVFWWLEGMCIQADCSRPQSCRAFRTHSSNSMLVFLKKFQTADDLGFLPEDDVPHLLGLGWNWASWRQSPPRAALRPAVSSSDQQSLIRKLQKRGSPSDVVTPIVTQHSKVNDSNELGGLTTSGSAEVHKAITISSPLTTDLTAELSGGPKNVSVQPEISEGLATTPSTQQVKSSEKTQIAVPQPVAPSYSYATPTPQASFQSTSAPYPVIKELVVSAGESVQITLPKNEVQLNAYVLQEPPKGETYTYDWQLITHPRDYSGEMEGKHSQILKLSKLTPGLYEFKVIVEGQNAHGEGYVNVTVKPEPRKNRPPIAIVSPQFQEISLPTTSTVIDGSQSTDDDKIVQYHWEELKGPLREEKISEDTAILKLSKLVPGNYTFSLTVVDSDGATNSTTANLTVNKAVDYPPVANAGPNQVITLPQNSITLFGNQSTDDHGITSYEWSLSPSSKGKVVEMQGVRTPTLQLSAMQEGDYTYQLTVTDTIGQQATAQVTVIVQPENNKPPQADAGPDKELTLPVDSTTLDGSKSSDDQKIISYLWEKTQGPDGVQLENANSSVATVTGLQVGTYVFTLTVKDERNLQSQSSVNVIVKEEINKPPIAKITGNVVITLPTSTAELDGSKSSDDKGIVSYLWTRDEGSPAAGEVLNHSDHHPILFLSNLVEGTYTFHLKVTDAKGESDTDRTTVEVKPDPRKNNLVEIILDINVSQLTERLKGMFIRQIGVLLGVLDSDIIVQKIQPYTEQSTKMVFFVQNEPPHQIFKGHEVAAMLKSELRKQKADFLIFRALEVNTVTCQLNCSDHGHCDSFTKRCICDPFWMENFIKVQLRDGDSNCEWSVLYVIIATFVIVVALGILSWTVICCCKRQKGKPKRKSKYKILDATDQESLELKPTSRAGIKQKGLLLSSSLMHSESELDSDDAIFTWPDREKGKLLHGQNGSVPNGQTPLKARSPREEIL

SEQ ID NO: 36 - protein, 1048 aa, Mus musculus
MEKRLGVKPSPASWVLPGYCWQTSVKLPRSLYLLYSFFCFSVLWLSTDADESRCQQGKTLYGAGLRTEGENHLRLLAGSLPFHACRAACCRDSACHALWWLEGMCFQADCSKPQSCQPFRTDSSNSMLIIFQKSQTTDDLGLLPEDDEPHLLRLGWGRTSWRRQSLLGAPLTLSVPSSHHQSLLRDRQKRDLSVVPTHGAMQHSKVNHSEEAGALSPTSAEVRKTITVAGSFTSNHTTQTPEWPKNVSIHPEPSEHSSPVSGTPQVKSTEHSPTDAPLPVAPSYSYATPTPQASSQSTSAPHPVVKELVVSAGKSVQITLPKNEVQLNAFVLPEAEPGETYTYDWQLITHPTDYSGEVERKHSQSLQLSKLTPGLYEFKVTVDGQNAHGEGYVNVTVKPEPRKNRPPVAVVSPQFQEISLPTTSTIIDGSQSTDDDKIVQYHWEELKGPLREEKISEDTAILKLSKLVPGNYTFSLTVVDSDGATNSTTASLTVNKAVDYPPVANAGPNQVITLPQNSITLFGNQSTDDHGITSYEWSLSPSSKGKVVEMQGVRTPALQLSAMQEGDYTYQLTVTDTAGQQATAQVTVIVQPENNKPPQADAGPDKELTLPVDSTTLDGSKSTDDQRVVSYLWEQSRGPDGVQLENANSSVATVTGLQVGTYVFTLTVKDERNLQSQSSVNVIVKEEINKPPVAKIAGNVVVTLPTSTAELDGSRSSDDKGIVSYLWTRDETSPAAGEVLNHSDHHPVLFLSNLVEGTYTFHLKVTDAKGESDTDRTTVEVKPDPRKSNLVEIILDVNVSQLTERLKGMLIRQIGVLLGVLDSDIIVQKIQPYTEQSTKMLFFVQNDPPHQLFKGHEVAAMLKSELQKQKADFLIFRALEISTVTCQLNCSDHGHCDSFTKRCVCDPFWMENFIKVQLRDGDSNCEWSVLYVIIASFVIVVALGILSWTTICCCKRQKGKPKRKSRYKILDATDQESLELKPTSRAGSKQKGPTLSSSLMHSESELDSDDAIFTWPDREKGKLLYGQNGSVPNGQTPLKSRSAREEIL

SEQ ID NO: 37 - protein, 92 aa, synthetic construct
  REGION 1..92: note = Mouse PKD1
VVSAGKSVQITLPKNEVQLNAFVLPEAEPGETYTYDWQLITHPTDYSGEVERKHSQSLQLSKLTPGLYEFKVTVDGQNAHGEGYVNVTVKPE

SEQ ID NO: 38 - protein, 90 aa, synthetic construct
  REGION 1..90: note = Mouse PKD2
VAVVSPQFQEISLPTTSTIIDGSQSTDDDKIVQYHWEELKGPLREEKISEDTAILKLSKLVPGNYTFSLTVVDSDGATNSTTASLTVNKA

SEQ ID NO: 39 - protein, 91 aa, synthetic construct
  REGION 1..91: note = Mouse PKD3
VANAGPNQVITLPQNSITLFGNQSTDDHGITSYEWSLSPSSKGKVVEMQGVRTPALQLSAMQEGDYTYQLTVTDTAGQQATAQVTVIVQPE

SEQ ID NO: 40 - protein, 89 aa, synthetic construct
  REGION 1..89: note = Mouse PKD4
QADAGPDKELTLPVDSTTLDGSKSTDDQRVVSYLWEQSRGPDGVQLENANSSVATVTGLQVGTYVFTLTVKDERNLQSQSSVNVIVKEE

SEQ ID NO: 41 - protein, 92 aa, synthetic construct
  REGION 1..92: note = Mouse PKD5
VAKIAGNVVVTLPTSTAELDGSRSSDDKGIVSYLWTRDETSPAAGEVLNHSDHHPVLFLSNLVEGTYTFHLKVTDAKGESDTDRTTVEVKPD

SEQ ID NO: 42 - protein, 1049 aa, Pongo sp.
MEKRLGVKPNPASWILSGYYWQTSAKWLRTLYLFYTCFCFSVLWLSTDASESRCQQGKTQFGVGLRSGGENHLWLLEGTPSLQSCWAACCQDSACHVFWWLEGMCIQADCSRPQSCRAFRTHSSNSMLMFLKKFQTADDLGFLPEDDVPHLLGLGWNWASWRQSPPRAALRPAVSSSDQQSLIRKLQKRGSPSEVVTPIVTQHSKVNDSNELGGLTTSGSAEVHKAITISSPLTTDLTAELPGGPKNVSAQPEIPEGLATTPSTQQVKSSEKTQIAVPQPVAPSYSYGTPTPQASFQSTSAPYPVIKELVVSAGDSVQITLPKNEVQLNAYVLQEPPKGETYTYDWQLITHPRDYSGEMEGKHSQILKLSKLTPGLYEFKVIVEGQNAHGEGYVNVTVKPEPRKNRPPIAIVSPQFQEISLPTTSTVIDGSQSTDDDKIVQYHWEELKGPLREEKISEDTAILKLSKLVPGNYTFSLTVVDSDGATNSTTANLTVNKAVDYPPVANAGPNQVITLPQNSITLFGNQSTDDHGITSYEWSLSPSSKGKVVEMQGVRTPTLQLSAMQEGDYTYQLTVTDTIGQQATAQVTVIVQPENNKPPQADAGPDKELTLPVDSTTLDGSKSSDDQKIISYLWEKTQGPDGVQLENANSSIATVTGLQVGTYVFTLTVKDERNLQSQSSVNVIVKEEINKPPIAKITGNVVITLPTSTAELDGSKSSDDKGIVSYLWTRDEGSPAAGEVLNHSDHHPILFLSNLVEGTYTFHLKVTDAKGESDTDRTTVEVKPDPRKNNLVEIILDINVSQLTERLKGMFIRQIGVLLGVLDSDIIVQKIQPYTEQSTKMVFFVQNEPPHQIFKGHEVAAMLKSELRKQKADFLIFRALEINTVTCQLNCSDHGHCDSFTKRCICDPFWMENFIKVQLRDGESNCEWSVLYVIIATFVIVVALGILSWTVICCCKRQKGKPKRKSKYKILDATDQESLELKPTSRTGIKQKGLVLSSSLMHSESELDSDDAIFTWPDREKGKLLHGQNGSVPNGQTPLKARSPREEIL

SEQ ID NO: 43 - protein, 92 aa, synthetic construct
  REGION 1..92: note = Orangutan PKD1
VVSAGDSVQITLPKNEVQLNAYVLQEPPKGETYTYDWQLITHPRDYSGEMEGKHSQILKLSKLTPGLYEFKVIVEGQNAHGEGYVNVTVKPE

SEQ ID NO: 44 - protein, 90 aa, synthetic construct; identical to SEQ ID NO: 29
  REGION 1..90: note = Orangutan PKD2

SEQ ID NO: 45 - protein, 91 aa, synthetic construct; identical to SEQ ID NO: 30
  REGION 1..91: note = Orangutan PKD3

SEQ ID NO: 46 - protein, 89 aa, synthetic construct
  REGION 1..89: note = Orangutan PKD4
QADAGPDKELTLPVDSTTLDGSKSSDDQKIISYLWEKTQGPDGVQLENANSSIATVTGLQVGTYVFTLTVKDERNLQSQSSVNVIVKEE

SEQ ID NO: 47 - protein, 92 aa, synthetic construct; identical to SEQ ID NO: 32
  REGION 1..92: note = Orangutan PKD5

SEQ ID NO: 48 - protein, 30 aa, synthetic construct
  REGION 1..30: note = Linker peptide
  VARIANT 2..30: note = Each individual Gly may be present or absent
GGGGGGGGGGGGGGGGGGGGGGGGGGGGGG

SEQ ID NO: 49 - protein, 79 aa, synthetic construct
  REGION 1..79: note = Human MANEC (motif at N terminus with eight cysteines)
ASESRCQQGKTQFGVGLRSGGENHLWLLEGTPSLQSCWAACCQDSACHVFWWLEGMCIQADCSRPQSCRAFRTHSSNSM

SEQ ID NO: 50 - protein, 79 aa, synthetic construct
  REGION 1..79: note = Mouse MANEC (motif at N terminus with eight cysteines)
ADESRCQQGKTLYGAGLRTEGENHLRLLAGSLPFHACRAACCRDSACHALWWLEGMCFQADCSKPQSCQPFRTDSSNSM

SEQ ID NO: 51 - protein, 79 aa, synthetic construct; identical to SEQ ID NO: 49
  REGION 1..79: note = Orangutan MANEC (motif at N terminus with eight cysteines)

SEQ ID NO: 52 - protein, 100 aa, synthetic construct
  REGION 1..100: note = Recombinant PKD2
GNRPPIAIVSPQFQEISLPTTSTVIDGSQSTDDDKIVQYHWEELKGPLREEKISEDTAILKLSKLVPGNYTFSLTVVDSDGATNSTTANLTVNKAVDYPG

SEQ ID NO: 53 - protein, 100 aa, synthetic construct
  REGION 1..100: note = Recombinant PKD2
GNRPPIAIVSPQFQEISLPTTSTVIDGHQSTDDDKIVQYHWEELKGPLREEKISEDTAILKLSKLVPGNYTFSLTVVDSDGATNSTTANLTVNKAVDYPG

SEQ ID NO: 54 - protein, 100 aa, synthetic construct
  REGION 1..100: note = Recombinant PKD2
GNRPPIAIVSPQFQEISLPTTSTVIDGSHSTDDDKIVQYHWEELKGPLREEKISEDTAILKLSKLVPGNYTFSLTVVDSDGATNSTTANLTVNKAVDYPG

SEQ ID NO: 55 - protein, 100 aa, synthetic construct
  REGION 1..100: note = Recombinant PKD2
GNRPPIAIVSPQFQEISLPTTSTVIDGSQSHDDDKIVQYHWEELKGPLREEKISEDTAILKLSKLVPGNYTFSLTVVDSDGATNSTTANLTVNKAVDYPG

SEQ ID NO: 56 - protein, 100 aa, synthetic construct
  REGION 1..100: note = Recombinant PKD2
GNRPPIAIVSPQFQEISLPTTSTVIDGSQSTDDHKIVQYHWEELKGPLREEKISEDTAILKLSKLVPGNYTFSLTVVDSDGATNSTTANLTVNKAVDYPG

SEQ ID NO: 57 - protein, 100 aa, synthetic construct
  REGION 1..100: note = Recombinant PKD2
GNRPPIAIVSPQFQEISLPTTSTVIDGSQSTDDDHIVQYHWEELKGPLREEKISEDTAILKLSKLVPGNYTFSLTVVDSDGATNSTTANLTVNKAVDYPG

SEQ ID NO: 58 - protein, 100 aa, synthetic construct
  REGION 1..100: note = Recombinant PKD2
GNRPPIAIVSPQFQEISLPTTSTVIDGSQSTDDDKHVQYHWEELKGPLREEKISEDTAILKLSKLVPGNYTFSLTVVDSDGATNSTTANLTVNKAVDYPG

SEQ ID NO: 59 - protein, 100 aa, synthetic construct
  REGION 1..100: note = Recombinant PKD2
GNRPPIAIVSPQFQEISLPTTSTVIDGSQSTDDDKIHQYHWEELKGPLREEKISEDTAILKLSKLVPGNYTFSLTVVDSDGATNSTTANLTVNKAVDYPG

SEQ ID NO: 60 - protein, 100 aa, synthetic construct
  REGION 1..100: note = Recombinant PKD2
GNRPPIAIVSPQFQEISLPTTSTVIDGSQSTDDDKIVQHHWEELKGPLREEKISEDTAILKLSKLVPGNYTFSLTVVDSDGATNSTTANLTVNKAVDYPG

SEQ ID NO: 61 - protein, 100 aa, synthetic construct
  REGION 1..100: note = Recombinant PKD2
GNRPPIAIVSPQFQEISLPTTSTVIDGSQSTDDDKIVQYHWEELKGPLREEKISEDTAHLKLSKLVPGNYTFSLTVVDSDGATNSTTANLTVNKAVDYPG

SEQ ID NO: 62 - protein, 100 aa, synthetic construct
  REGION 1..100: note = Recombinant PKD2
GNRPPIAIVSPQFQEISLPTTSTVIDGSQSTDDDKIHQHHWEELKGPLREEKISEDTAILKLSKLVPGNYTFSLTVVDSDGATNSTTANLTVNKAVDYPG

SEQ ID NO: 63 - protein, 100 aa, synthetic construct
  REGION 1..100: note = Recombinant PKD2
GNRPPIAIVSPQFQEISLPTTSTVIDGHHSTDDDKIVQYHWEELKGPLREEKISEDTAILKLSKLVPGNYTFSLTVVDSDGATNSTTANLTVNKAVDYPG

SEQ ID NO: 64 - protein, 99 aa, synthetic construct
  REGION 1..99: note = Recombinant PKD2
GNRPPIAIVSPQFQEISLPTTSTVIDGSQSTDDDKIVQYHWEELKGPLREEKISEDTAILKLSKLVPGNYTFSLTVVDSDGATNSTTANLTVNKAVDYP

SEQ ID NO: 65 - protein, 99 aa, synthetic construct
  REGION 1..99: note = Recombinant PKD2
GNRPPIAIVSPQFQEISLPTTSTVIDGHQSTDDDKIVQYHWEELKGPLREEKISEDTAILKLSKLVPGNYTFSLTVVDSDGATNSTTANLTVNKAVDYP

SEQ ID NO: 66 - protein, 99 aa, synthetic construct
  REGION 1..99: note = Recombinant PKD2
GNRPPIAIVSPQFQEISLPTTSTVIDGSHSTDDDKIVQYHWEELKGPLREEKISEDTAILKLSKLVPGNYTFSLTVVDSDGATNSTTANLTVNKAVDYP

SEQ ID NO: 67 - protein, 99 aa, synthetic construct
  REGION 1..99: note = Recombinant PKD2
GNRPPIAIVSPQFQEISLPTTSTVIDGSQSHDDDKIVQYHWEELKGPLREEKISEDTAILKLSKLVPGNYTFSLTVVDSDGATNSTTANLTVNKAVDYP

SEQ ID NO: 68 - protein, 99 aa, synthetic construct
  REGION 1..99: note = Recombinant PKD2
GNRPPIAIVSPQFQEISLPTTSTVIDGSQSTDDHKIVQYHWEELKGPLREEKISEDTAILKLSKLVPGNYTFSLTVVDSDGATNSTTANLTVNKAVDYP

SEQ ID NO: 69 - protein, 99 aa, synthetic construct
  REGION 1..99: note = Recombinant PKD2
GNRPPIAIVSPQFQEISLPTTSTVIDGSQSTDDDHIVQYHWEELKGPLREEKISEDTAILKLSKLVPGNYTFSLTVVDSDGATNSTTANLTVNKAVDYP

SEQ ID NO: 70 - protein, 99 aa, synthetic construct
  REGION 1..99: note = Recombinant PKD2
GNRPPIAIVSPQFQEISLPTTSTVIDGSQSTDDDKHVQYHWEELKGPLREEKISEDTAILKLSKLVPGNYTFSLTVVDSDGATNSTTANLTVNKAVDYP

SEQ ID NO: 71 - protein, 99 aa, synthetic construct
  REGION 1..99: note = Recombinant PKD2
GNRPPIAIVSPQFQEISLPTTSTVIDGSQSTDDDKIHQYHWEELKGPLREEKISEDTAILKLSKLVPGNYTFSLTVVDSDGATNSTTANLTVNKAVDYP

SEQ ID NO: 72 - protein, 99 aa, synthetic construct
  REGION 1..99: note = Recombinant PKD2
GNRPPIAIVSPQFQEISLPTTSTVIDGSQSTDDDKIVQHHWEELKGPLREEKISEDTAILKLSKLVPGNYTFSLTVVDSDGATNSTTANLTVNKAVDYP

SEQ ID NO: 73 - protein, 99 aa, synthetic construct
  REGION 1..99: note = Recombinant PKD2
GNRPPIAIVSPQFQEISLPTTSTVIDGSQSTDDDKIVQYHWEELKGPLREEKISEDTAHLKLSKLVPGNYTFSLTVVDSDGATNSTTANLTVNKAVDYP

SEQ ID NO: 74 - protein, 99 aa, synthetic construct
  REGION 1..99: note = Recombinant PKD2
GNRPPIAIVSPQFQEISLPTTSTVIDGSQSTDDDKIHQHHWEELKGPLREEKISEDTAILKLSKLVPGNYTFSLTVVDSDGATNSTTANLTVNKAVDYP

SEQ ID NO: 75 - protein, 99 aa, synthetic construct
  REGION 1..99: note = Recombinant PKD2
GNRPPIAIVSPQFQEISLPTTSTVIDGHHSTDDDKIVQYHWEELKGPLREEKISEDTAILKLSKLVPGNYTFSLTVVDSDGATNSTTANLTVNKAVDYP

SEQ ID NO: 76 - protein, 90 aa, synthetic construct
  REGION 1..90: note = Recombinant PKD2
IAIVSPQFQEISLPTTSTVIDGHQSTDDDKIVQYHWEELKGPLREEKISEDTAILKLSKLVPGNYTFSLTVVDSDGATNSTTANLTVNKA

SEQ ID NO: 77 - protein, 90 aa, synthetic construct
  REGION 1..90: note = Recombinant PKD2
IAIVSPQFQEISLPTTSTVIDGSHSTDDDKIVQYHWEELKGPLREEKISEDTAILKLSKLVPGNYTFSLTVVDSDGATNSTTANLTVNKA

SEQ ID NO: 78 - protein, 90 aa, synthetic construct
  REGION 1..90: note = Recombinant PKD2
IAIVSPQFQEISLPTTSTVIDGSQSHDDDKIVQYHWEELKGPLREEKISEDTAILKLSKLVPGNYTFSLTVVDSDGATNSTTANLTVNKA

SEQ ID NO: 79 - protein, 90 aa, synthetic construct
  REGION 1..90: note = Recombinant PKD2
IAIVSPQFQEISLPTTSTVIDGSQSTDDHKIVQYHWEELKGPLREEKISEDTAILKLSKLVPGNYTFSLTVVDSDGATNSTTANLTVNKA

SEQ ID NO: 80 - protein, 90 aa, synthetic construct
  REGION 1..90: note = Recombinant PKD2
IAIVSPQFQEISLPTTSTVIDGSQSTDDDHIVQYHWEELKGPLREEKISEDTAILKLSKLVPGNYTFSLTVVDSDGATNSTTANLTVNKA

SEQ ID NO: 81 - protein, 90 aa, synthetic construct
  REGION 1..90: note = Recombinant PKD2
IAIVSPQFQEISLPTTSTVIDGSQSTDDDKHVQYHWEELKGPLREEKISEDTAILKLSKLVPGNYTFSLTVVDSDGATNSTTANLTVNKA

SEQ ID NO: 82 - protein, 90 aa, synthetic construct
  REGION 1..90: note = Recombinant PKD2
IAIVSPQFQEISLPTTSTVIDGSQSTDDDKIHQYHWEELKGPLREEKISEDTAILKLSKLVPGNYTFSLTVVDSDGATNSTTANLTVNKA

SEQ ID NO: 83 - protein, 90 aa, synthetic construct
  REGION 1..90: note = Recombinant PKD2
IAIVSPQFQEISLPTTSTVIDGSQSTDDDKIVQHHWEELKGPLREEKISEDTAILKLSKLVPGNYTFSLTVVDSDGATNSTTANLTVNKA

SEQ ID NO: 84 - protein, 90 aa, synthetic construct
  REGION 1..90: note = Recombinant PKD2
IAIVSPQFQEISLPTTSTVIDGSQSTDDDKIVQYHWEELKGPLREEKISEDTAHLKLSKLVPGNYTFSLTVVDSDGATNSTTANLTVNKA

SEQ ID NO: 85 - protein, 90 aa, synthetic construct
  REGION 1..90: note = Recombinant PKD2
IAIVSPQFQEISLPTTSTVIDGSQSTDDDKIHQHHWEELKGPLREEKISEDTAILKLSKLVPGNYTFSLTVVDSDGATNSTTANLTVNKA

SEQ ID NO: 86 - protein, 90 aa, synthetic construct
  REGION 1..90: note = Recombinant PKD2
IAIVSPQFQEISLPTTSTVIDGHHSTDDDKIVQYHWEELKGPLREEKISEDTAILKLSKLVPGNYTFSLTVVDSDGATNSTTANLTVNKA

SEQ ID NO: 87 - protein, 500 aa, synthetic construct
  REGION 1..500: note = Purification Matrix
GNRPPIAIVSPQFQEISLPTTSTVIDGSQSTDDDKIVQYHWEELKGPLREEKISEDTAILKLSKLVPGNYTFSLTVVDSDGATNSTTANLTVNKAVDYPGVGVPGLGVPGVGVPGLGVPGVGVPGVGVPGLGVPGVGVPGLGVPGVGVPGVGVPGLGVPGVGVPGLGVPGVGVPGVGVPGLGVPGVGVPGLGVPGVGVPGVGVPGLGVPGVGVPGLGVPGVGVPGVGVPGLGVPGVGVPGLGVPGVGVPGVGVPGLGVPGVGVPGLGVPGVGVPGVGVPGLGVPGVGVPGLGVPGVGVPGVGVPGLGVPGVGVPGLGVPGVGVPGVGVPGLGVPGVGVPGLGVPGVGVPGVGVPGLGVPGVGVPGLGVPGVGVPGVGVPGLGVPGVGVPGLGVPGVGVPGVGVPGLGVPGVGVPGLGVPGVGVPGVGVPGLGVPGVGVPGLGVPGVGVPGVGVPGLGVPGVGVPGLGVPGVGVPGVGVPGLGVPGVGVPGLGVPGVGVPG

SEQ ID NO: 88 - protein, 401 aa, synthetic construct
  REGION 1..401: note = Polypeptide with Phase Behavior
GVGVPGLGVPGVGVPGLGVPGVGVPGVGVPGLGVPGVGVPGLGVPGVGVPGVGVPGLGVPGVGVPGLGVPGVGVPGVGVPGLGVPGVGVPGLGVPGVGVPGVGVPGLGVPGVGVPGLGVPGVGVPGVGVPGLGVPGVGVPGLGVPGVGVPGVGVPGLGVPGVGVPGLGVPGVGVPGVGVPGLGVPGVGVPGLGVPGVGVPGVGVPGLGVPGVGVPGLGVPGVGVPGVGVPGLGVPGVGVPGLGVPGVGVPGVGVPGLGVPGVGVPGLGVPGVGVPGVGVPGLGVPGVGVPGLGVPGVGVPGVGVPGLGVPGVGVPGLGVPGVGVPGVGVPGLGVPGVGVPGLGVPGVGVPGVGVPGLGVPGVGVPGLGVPGVGVPGVGVPGLGVPGVGVPGLGVPGVGVPG

SEQ ID NO: 89 - protein, 5 aa, synthetic construct
  REGION 1..5: note = AAV-binding polypeptide optional N-terminal sequence
GNRPP

SEQ ID NO: 90 - protein, 5 aa, synthetic construct
  REGION 1..5: note = AAV-binding polypeptide optional C-terminal sequence
VYDPG

SEQ ID NO: 91 - protein, 4 aa, synthetic construct
  REGION 1..4: note = AAV-binding polypeptide optional C-terminal sequence
VYDP

SEQ ID NO: 92 - protein, 290 aa, synthetic construct
  REGION 1..290: note = AAV binding polypeptide
MASVSAGESVQITLPKNEVQLNAYVLQEPPKGETYTYDWQLITHPRDYSGEMEGKHSQILKLSKLTPGLYEFKVIVEGQNAHGEGYVNVTVKPEPRKNRPPIAIVSPQFQEISLPTTSTVIDGSQSTDDDKIVQYHWEELKGPLREEKISEDTAILKLSKLVPGNYTFSLTVVDSDGATNSTTANLTVNKAVDYPPVANAGPNQVITLPQNSITLFGNQSTDDHGITSYEWSLSPSSKGKVVEMQGVRTPTLQLSAMQEGDYTYQLTVTDTIGQQATAQVTVIVQPENNK

SEQ ID NO: 93 - DNA, 300 bp, synthetic construct
  misc_feature 1..300: note = Recombinant PKD2
  source 1..300: mol_type = other DNA
gggaatcgtccgcccatcgctattgtcagccctcaatttcaggagatcagcttgccgacaacctccactgtaattgatggttcccagtcgaccgacgacgataaaatcgtacaataccactgggaggaactcaaggggccgctgcgtgaggaaaagatcagcgaggataccgcaattttgaaacttagtaaactggttcccggcaactacacattttctttaacggttgtagactcggatggtgccaccaactctacgaccgctaatcttacagtgaacaaagcggtcgattatccgggc

SEQ ID NO: 94 - DNA, 300 bp, synthetic construct
  misc_feature 1..300: note = Recombinant PKD2
  source 1..300: mol_type = other DNA
gggaatcgtccgcccatcgctattgtcagccctcaatttcaggagatcagcttgccgacaacctccactgtaattgatggtcatcagtcgaccgacgacgataaaatcgtacaataccactgggaggaactcaaggggccgctgcgtgaggaaaagatcagcgaggataccgcaattttgaaacttagtaaactggttcccggcaactacacattttctttaacggttgtagactcggatggtgccaccaactctacgaccgctaatcttacagtgaacaaagcggtcgattatccgggc

SEQ ID NO: 95 - DNA, 300 bp, synthetic construct
  misc_feature 1..300: note = Recombinant PKD2
  source 1..300: mol_type = other DNA
gggaatcgtccgcccatcgctattgtcagccctcaatttcaggagatcagcttgccgacaacctccactgtaattgatggttcccattcgaccgacgacgataaaatcgtacaataccactgggaggaactcaaggggccgctgcgtgaggaaaagatcagcgaggataccgcaattttgaaacttagtaaactggttcccggcaactacacattttctttaacggttgtagactcggatggtgccaccaactctacgaccgctaatcttacagtgaacaaagcggtcgattatccgggc

SEQ ID NO: 96 - DNA, 300 bp, synthetic construct
  misc_feature 1..300: note = Recombinant PKD2
  source 1..300: mol_type = other DNA
gggaatcgtccgcccatcgctattgtcagccctcaatttcaggagatcagcttgccgacaacctccactgtaattgatggttcccagtcgcatgacgacgataaaatcgtacaataccactgggaggaactcaaggggccgctgcgtgaggaaaagatcagcgaggataccgcaattttgaaacttagtaaactggttcccggcaactacacattttctttaacggttgtagactcggatggtgccaccaactctacgaccgctaatcttacagtgaacaaagcggtcgattatccgggc

SEQ ID NO: 97 - DNA, 300 bp, synthetic construct
  misc_feature 1..300: note = Recombinant PKD2
  source 1..300: mol_type = other DNA
gggaatcgtccgcccatcgctattgtcagccctcaatttcaggagatcagcttgccgacaacctccactgtaattgatggttcccagtcgaccgacgaccataaaatcgtacaataccactgggaggaactcaaggggccgctgcgtgaggaaaagatcagcgaggataccgcaattttgaaacttagtaaactggttcccggcaactacacattttctttaacggttgtagactcggatggtgccaccaactctacgaccgctaatcttacagtgaacaaagcggtcgattatccgggc

SEQ ID NO: 98 - DNA, 300 bp, synthetic construct
  misc_feature 1..300: note = Recombinant PKD2
  source 1..300: mol_type = other DNA
gggaatcgtccgcccatcgctattgtcagccctcaatttcaggagatcagcttgccgacaacctccactgtaattgatggttcccagtcgaccgacgacgatcatatcgtacaataccactgggaggaactcaaggggccgctgcgtgaggaaaagatcagcgaggataccgcaattttgaaacttagtaaactggttcccggcaactacacattttctttaacggttgtagactcggatggtgccaccaactctacgaccgctaatcttacagtgaacaaagcggtcgattatccgggc

SEQ ID NO: 99 - DNA, 300 bp, synthetic construct
  misc_feature 1..300: note = Recombinant PKD2
  source 1..300: mol_type = other DNA
gggaatcgtccgcccatcgctattgtcagccctcaatttcaggagatcagcttgccgacaacctccactgtaattgatggttcccagtcgaccgacgacgataaacatgtacaataccactgggaggaactcaaggggccgctgcgtgaggaaaagatcagcgaggataccgcaattttgaaacttagtaaactggttcccggcaactacacattttctttaacggttgtagactcggatggtgccaccaactctacgaccgctaatcttacagtgaacaaagcggtcgattatccgggc

SEQ ID NO: 100 - DNA, 300 bp, synthetic construct
  misc_feature 1..300: note = Recombinant PKD2
  source 1..300: mol_type = other DNA
gggaatcgtccgcccatcgctattgtcagccctcaatttcaggagatcagcttgccgacaacctccactgtaattgatggttcccagtcgaccgacgacgataaaatccatcaataccactgggaggaactcaaggggccgctgcgtgaggaaaagatcagcgaggataccgcaattttgaaacttagtaaactggttcccggcaactacacattttctttaacggttgtagactcggatggtgccaccaactctacgaccgctaatcttacagtgaacaaagcggtcgattatccgggc

SEQ ID NO: 101 - DNA, 300 bp, synthetic construct
  misc_feature 1..300: note = Recombinant PKD2
  source 1..300: mol_type = other DNA
gggaatcgtccgcccatcgctattgtcagccctcaatttcaggagatcagcttgccgacaacctccactgtaattgatggttcccagtcgaccgacgacgataaaatcgtacaacatcactgggaggaactcaaggggccgctgcgtgaggaaaagatcagcgaggataccgcaattttgaaacttagtaaactggttcccggcaactacacattttctttaacggttgtagactcggatggtgccaccaactctacgaccgctaatcttacagtgaacaaagcggtcgattatccgggc

SEQ ID NO: 102 - DNA, 300 bp, synthetic construct
  misc_feature 1..300: note = Recombinant PKD2
  source 1..300: mol_type = other DNA
gggaatcgtccgcccatcgctattgtcagccctcaatttcaggagatcagcttgccgacaacctccactgtaattgatggttcccagtcgaccgacgacgataaaatcgtacaataccactgggaggaactcaaggggccgctgcgtgaggaaaagatcagcgaggataccgcacatttgaaacttagtaaactggttcccggcaactacacattttctttaacggttgtagactcggatggtgccaccaactctacgaccgctaatcttacagtgaacaaagcggtcgattatccgggc

SEQ ID NO: 103 - DNA, 300 bp, synthetic construct
  misc_feature 1..300: note = Recombinant PKD2
  source 1..300: mol_type = other DNA
gggaatcgtccgcccatcgctattgtcagccctcaatttcaggagatcagcttgccgacaacctccactgtaattgatggttcccagtcgaccgacgacgataaaatccaccaacatcactgggaggaactcaaggggccgctgcgtgaggaaaagatcagcgaggataccgcaattttgaaacttagtaaactggttcccggcaactacacattttctttaacggttgtagactcggatggtgccaccaactctacgaccgctaatcttacagtgaacaaagcggtcgattatccgggc

SEQ ID NO: 104 - DNA, 300 bp, synthetic construct
  misc_feature 1..300: note = Recombinant PKD2
  source 1..300: mol_type = other DNA
gggaatcgtccgcccatcgctattgtcagccctcaatttcaggagatcagcttgccgacaacctccactgtaattgatggtcatcactcgaccgacgacgataaaatcgtacaataccactgggaggaactcaaggggccgctgcgtgaggaaaagatcagcgaggataccgcaattttgaaacttagtaaactggttcccggcaactacacattttctttaacggttgtagactcggatggtgccaccaactctacgaccgctaatcttacagtgaacaaagcggtcgattatccgggc

SEQ ID NO: 105 - DNA, 400 bp, synthetic construct
  misc_feature 1..400: note = Recombinant PKD2
  source 1..400: mol_type = other DNA
aattcccctctagaaataattttgtttaactttaagaaggaggagtacatatggggaatcgtccgcccatcgctattgtcagccctcaatttcaggagatcagcttgccgacaacctccactgtaattgatggttcccagtcgaccgacgacgataaaatcgtacaataccactgggaggaactcaaggggccgctgcgtgaggaaaagatcagcgaggataccgcaattttgaaacttagtaaactggttcccggcaactacacattttctttaacggttgtagactcggatggtgccaccaactctacgaccgctaatcttacagtgaacaaagcggtcgattatccgggctactgataatgatcttcaggatccgaattcgagctccgtcgacaagc

SEQ ID NO: 106 - DNA, 400 bp, synthetic construct
  misc_feature 1..400: note = Recombinant PKD2
  source 1..400: mol_type = other DNA
aattcccctctagaaataattttgtttaactttaagaaggaggagtacatatggggaatcgtccgcccatcgctattgtcagccctcaatttcaggagatcagcttgccgacaacctccactgtaattgatggtcatcagtcgaccgacgacgataaaatcgtacaataccactgggaggaactcaaggggccgctgcgtgaggaaaagatcagcgaggataccgcaattttgaaacttagtaaactggttcccggcaactacacattttctttaacggttgtagactcggatggtgccaccaactctacgaccgctaatcttacagtgaacaaagcggtcgattatccgggctactgataatgatcttcaggatccgaattcgagctccgtcgacaagc

SEQ ID NO: 107 - DNA, 400 bp, synthetic construct
  misc_feature 1..400: note = Recombinant PKD2
  source 1..400: mol_type = other DNA
aattcccctctagaaataattttgtttaactttaagaaggaggagtacatatggggaatcgtccgcccatcgctattgtcagccctcaatttcaggagatcagcttgccgacaacctccactgtaattgatggttcccattcgaccgacgacgataaaatcgtacaataccactgggaggaactcaaggggccgctgcgtgaggaaaagatcagcgaggataccgcaattttgaaacttagtaaactggttcccggcaactacacattttctttaacggttgtagactcggatggtgccaccaactctacgaccgctaatcttacagtgaacaaagcggtcgattatccgggctactgataatgatcttcaggatccgaattcgagctccgtcgacaagc

SEQ ID NO: 108 - DNA, 400 bp, synthetic construct
  misc_feature 1..400: note = Recombinant PKD2
  source 1..400: mol_type = other DNA
aattcccctctagaaataattttgtttaactttaagaaggaggagtacatatggggaatcgtccgcccatcgctattgtcagccctcaatttcaggagatcagcttgccgacaacctccactgtaattgatggttcccagtcgcatgacgacgataaaatcgtacaataccactgggaggaactcaaggggccgctgcgtgaggaaaagatcagcgaggataccgcaattttgaaacttagtaaactggttcccggcaactacacattttctttaacggttgtagactcggatggtgccaccaactctacgaccgctaatcttacagtgaacaaagcggtcgattatccgggctactgataatgatcttcaggatccgaattcgagctccgtcgacaagc

SEQ ID NO: 109 - DNA, 400 bp, synthetic construct
  misc_feature 1..400: note = Recombinant PKD2
  source 1..400: mol_type = other DNA
aattcccctctagaaataattttgtttaactttaagaaggaggagtacatatggggaatcgtccgcccatcgctattgtcagccctcaatttcaggagatcagcttgccgacaacctccactgtaattgatggttcccagtcgaccgacgaccataaaatcgtacaataccactgggaggaactcaaggggccgctgcgtgaggaaaagatcagcgaggataccgcaattttgaaacttagtaaactggttcccggcaactacacattttctttaacggttgtagactcggatggtgccaccaactctacgaccgctaatcttacagtgaacaaagcggtcgattatccgggctactgataatgatcttcaggatccgaattcgagctccgtcgacaagc

SEQ ID NO: 110 - DNA, 400 bp, synthetic construct
  misc_feature 1..400: note = Recombinant PKD2
  source 1..400: mol_type = other DNA
aattcccctctagaaataattttgtttaactttaagaaggaggagtacatatggggaatcgtccgcccatcgctattgtcagccctcaatttcaggagatcagcttgccgacaacctccactgtaattgatggttcccagtcgaccgacgacgatcatatcgtacaataccactgggaggaactcaaggggccgctgcgtgaggaaaagatcagcgaggataccgcaattttgaaacttagtaaactggttcccggcaactacacattttctttaacggttgtagactcggatggtgccaccaactctacgaccgctaatcttacagtgaacaaagcggtcgattatccgggctactgataatgatcttcaggatccgaattcgagctccgtcgacaagc

SEQ ID NO: 111 - DNA, 400 bp, synthetic construct
  misc_feature 1..400: note = Recombinant PKD2
  source 1..400: mol_type = other DNA
aattcccctctagaaataattttgtttaactttaagaaggaggagtacatatggggaatcgtccgcccatcgctattgtcagccctcaatttcaggagatcagcttgccgacaacctccactgtaattgatggttcccagtcgaccgacgacgataaacatgtacaataccactgggaggaactcaaggggccgctgcgtgaggaaaagatcagcgaggataccgcaattttgaaacttagtaaactggttcccggcaactacacattttctttaacggttgtagactcggatggtgccaccaactctacgaccgctaatcttacagtgaacaaagcggtcgattatccgggctactgataatgatcttcaggatccgaattcgagctccgtcgacaagc

SEQ ID NO: 112 - DNA, 400 bp, synthetic construct
  misc_feature 1..400: note = Recombinant PKD2
  source 1..400: mol_type = other DNA
aattcccctctagaaataattttgtttaactttaagaaggaggagtacatatggggaatcgtccgcccatcgctattgtcagccctcaatttcaggagatcagcttgccgacaacctccactgtaattgatggttcccagtcgaccgacgacgataaaatccatcaataccactgggaggaactcaaggggccgctgcgtgaggaaaagatcagcgaggataccgcaattttgaaacttagtaaactggttcccggcaactacacattttctttaacggttgtagactcggatggtgccaccaactctacgaccgctaatcttacagtgaacaaagcggtcgattatccgggctactgataatgatcttcaggatccgaattcgagctccgtcgacaagc

SEQ ID NO: 113 - DNA, 400 bp, synthetic construct
  misc_feature 1..400: note = Recombinant PKD2
  source 1..400: mol_type = other DNA
aattcccctctagaaataattttgtttaactttaagaaggaggagtacatatggggaatcgtccgcccatcgctattgtcagccctcaatttcaggagatcagcttgccgacaacctccactgtaattgatggttcccagtcgaccgacgacgataaaatcgtacaacatcactgggaggaactcaaggggccgctgcgtgaggaaaagatcagcgaggataccgcaattttgaaacttagtaaactggttcccggcaactacacattttctttaacggttgtagactcggatggtgccaccaactctacgaccgctaatcttacagtgaacaaagcggtcgattatccgggctactgataatgatcttcaggatccgaattcgagctccgtcgacaagc

SEQ ID NO: 114 - DNA, 400 bp, synthetic construct
  misc_feature 1..400: note = Recombinant PKD2
  source 1..400: mol_type = other DNA
aattcccctctagaaataattttgtttaactttaagaaggaggagtacatatggggaatcgtccgcccatcgctattgtcagccctcaatttcaggagatcagcttgccgacaacctccactgtaattgatggttcccagtcgaccgacgacgataaaatcgtacaataccactgggaggaactcaaggggccgctgcgtgaggaaaagatcagcgaggataccgcacatttgaaacttagtaaactggttcccggcaactacacattttctttaacggttgtagactcggatggtgccaccaactctacgaccgctaatcttacagtgaacaaagcggtcgattatccgggctactgataatgatcttcaggatccgaattcgagctccgtcgacaagc

SEQ ID NO: 115 - DNA, 400 bp, synthetic construct
  misc_feature 1..400: note = Recombinant PKD2
  source 1..400: mol_type = other DNA
aattcccctctagaaataattttgtttaactttaagaaggaggagtacatatggggaatcgtccgcccatcgctattgtcagccctcaatttcaggagatcagcttgccgacaacctccactgtaattgatggttcccagtcgaccgacgacgataaaatccaccaacatcactgggaggaactcaaggggccgctgcgtgaggaaaagatcagcgaggataccgcaattttgaaacttagtaaactggttcccggcaactacacattttctttaacggttgtagactcggatggtgccaccaactctacgaccgctaatcttacagtgaacaaagcggtcgattatccgggctactgataatgatcttcaggatccgaattcgagctccgtcgacaagc

SEQ ID NO: 116 - DNA, 400 bp, synthetic construct
  misc_feature 1..400: note = Recombinant PKD2
  source 1..400: mol_type = other DNA
aattcccctctagaaataattttgtttaactttaagaaggaggagtacatatggggaatcgtccgcccatcgctattgtcagccctcaatttcaggagatcagcttgccgacaacctccactgtaattgatggtcatcactcgaccgacgacgataaaatcgtacaataccactgggaggaactcaaggggccgctgcgtgaggaaaagatcagcgaggataccgcaattttgaaacttagtaaactggttcccggcaactacacattttctttaacggttgtagactcggatggtgccaccaactctacgaccgctaatcttacagtgaacaaagcggtcgattatccgggctactgataatgatcttcaggatccgaattcgagctccgtcgacaagc

SEQ ID NO: 117 - protein, 58 aa, synthetic construct [sequence omitted]

SEQ ID NO: 118 - protein, 59 aa, synthetic construct
  REGION 1..59: note = Capture domain
VDNKFNKEQQNAFYEILSLPNLNEEQRAAFIQSLKDDPSQSANLLAEAKKLNDAQAPKG

SEQ ID NO: 119 - protein, 59 aa, synthetic construct
  REGION 1..59: note = Capture domain
VDNKFNKEHQNAFYEILHLPNLNEEQRNAFIQSLKHDPSQSANLLAEAKKLNDAQAPKG

SEQ ID NO: 120 - protein, 254 aa, synthetic construct
  REGION 1..254: note = Capture domain
AQHDEAQQNAFYQVLNMPNLNADQRNGFIQSLKDDPSQSANVLGEAQKLNDSQAPKADAQQNKFNKDQQSAFYEILNMPNLNEEQRNGFIQSLKDDPSQSTNVLGEAKKLNESQAPKADNNFNKEQQNAFYEILNMPNLNEEQRNGFIQSLKDDPSQSANLLAEAKKLNESQAPKADNKFNKEQQNAFYEILHLPNLNEEQRNGFIQSLKDDPSQSANLLAEAKKLNDAQAPKADNKFNKEQQNAFYEILHLPN

SEQ ID NO: 121 - protein, 56 aa, synthetic construct
  REGION 1..56: note = Capture domain
TYKLILNGKTLKGETTTEAVDAATAEKVFKQYANDNGVDGEWTYDDATKTFTVTEG

SEQ ID NO: 122 - protein, 189 aa, synthetic construct
  REGION 1..189: note = Capture domain
KTDTYKLILNGKTLKGETTTEAVDAATAEKVFKQYANDNGVDGEWTYDDATKTFTVTEKPEVIDASELTPAVTTYKLVINGKTLKGETTTKAVDAETAEKAFKQYANDNGVDGVWTYDDATKTFTVTEMVTEVPGDAPTEPEKPEASIPLVPLTPATPIAKDDAKKDDTKKEDAKKPEAKKDDAKKAET

SEQ ID NO: 123 - protein, 76 aa, synthetic construct
  REGION 1..76: note = Capture domain
KEETPETPETDSEEEVTIKANLIFANGSTQTAEFKGTFEKATSEAYAYADTLKKDNGEYTVDVADKGYTLNLKFAG

SEQ ID NO: 124 - protein, 7 aa, synthetic construct
  REGION 1..7: note = Capture domain
  VARIANT 5..7: note = Xaa can be any naturally occurring amino acid
GYVSXXX

SEQ ID NO: 125 - protein, 226 aa, synthetic construct
  REGION 1..226: note = Capture domain
SDVQLQESGPDLVKPSQSLSLTCTVTGYSITSGYTWHWIRQFPGNKQEWGYIHFSGYTNYNPSLKSRVSITRDTSKNQFFLHLNSVTTEDTATYYCARGDYGYEWFTYWGQGTLVTVSADIQMTQSSSSFSVSLGDRVTITCKASEDIHNRLAWYKQKPGNAPRLLISGATSLETGVPSRFSGSGSGKDYTLSITSLQNEDVATYYCQQYWIGPFTFGSGTNLEIK

SEQ ID NO: 126 - protein, 11 aa, synthetic construct
  REGION 1..11: note = Capture domain
GYVSRHPGGGC

SEQ ID NO: 127 - protein, 12 aa, synthetic construct
  REGION 1..12: note = Capture domain
GYVSRHPGGGGS

SEQ ID NO: 128 - protein, 11 aa, synthetic construct
  REGION 1..11: note = Capture domain
FHENWPSGGGC

SEQ ID NO: 129 - protein, 12 aa, synthetic construct
  REGION 1..12: note = Capture domain
FHENWPSGGGGS

SEQ ID NO: 130 - protein, 7 aa, synthetic construct
  REGION 1..7: note = Capture domain
GVVTINP

SEQ ID NO: 131 - protein, 7 aa, synthetic construct
  REGION 1..7: note = Capture domain
GLVTPSG

SEQ ID NO: 132 - protein, 7 aa, synthetic construct
  REGION 1..7: note = Capture domain
GYVSHRS

SEQ ID NO: 133 - protein, 7 aa, synthetic construct
  REGION 1..7: note = Capture domain
KVWILTP

SEQ ID NO: 134 - protein, 7 aa, synthetic construct
  REGION 1..7: note = Capture domain
KLWVIPQ

SEQ ID NO: 135 - protein, 479 aa, synthetic construct
  REGION 1..479: note = Capture domain
GVSAGESVQITLPKNEVQLNAYVLQEPPKGETYTYDWQLITHPRDYSGEMEGKHSQILKLSKLTPGLYEFKVIVEGQNAHGEGYVNVTVKPEPRKNRPPIAIVSPQFQEISLPTTSTVIDGSQSTDDDKIVQYHWEELKGPLREEKISEDTAILKLSKLVPGNYTFSLTVVDSDGATNSTTANLTVNKAVDYPPVANAGPNQVITLPQNSITLFGNQSTDDHGITSYEWSLSPSSKGKVVEMQGVRTPTLQLSAMQEGDYTYQLTVTDTIGQQATAQVTVIVQPENNKPPQADAGPDKELTLPVDSTTLDGSKSSDDQKIISYLWEKTQGPDGVQLENANSSVATVTGLQVGTYVFTLTVKDERNLQSQSSVNVIVKEEINKPPIAKITGNVVITLPTSTAELDGSKSSDDKGIVSYLWTRDEGSPAAGEVLNHSDHHPILFLSNLVEGTYTFHLKVTDAKGESDTDRTTVEVKPDPRG

SEQ ID NO: 136 - protein, 90 aa, synthetic construct; identical to SEQ ID NO: 28
  REGION 1..90: note = Capture domain

SEQ ID NO: 137 - protein, 90 aa, synthetic construct; identical to SEQ ID NO: 29
  REGION 1..90: note = Capture domain

SEQ ID NO: 138 - protein, 190 aa, synthetic construct
  REGION 1..190: note = Capture domain
MGVSAGESVQITLPKNEVQLNAYVLQEPPKGETYTYDWQLITHPRDYSGEMEGKHSQILKLSKLTPGLYEFKVIVEGQNAHGEGYVNVTVKPEPRKNRPPIAIVSPQFQEISLPTTSTVIDGSQSTDDDKIVQYHWEELKGPLREEKISEDTAILKLSKLVPGNYTFSLTVVDSDGATNSTTANLTVNKA

SEQ ID NO: 139 - protein, 91 aa, synthetic construct; identical to SEQ ID NO: 30
  REGION 1..91: note = Capture domain

SEQ ID NO: 140 - protein, 89 aa, synthetic construct; identical to SEQ ID NO: 31
  REGION 1..89: note = Capture domain

SEQ ID NO: 141 - protein, 93 aa, synthetic construct
  REGION 1..93: note = Capture domain
IAKITGNVVITLPTSTAELDGSKSSDDKGIVSYLWTRDEGSPAAGEVLNHSDHHPILFLSNLVEGTYTFHLKVTDAKGESDTDRTTVEVKPDP

SEQ ID NO: 142 - protein, 46 aa, synthetic construct
  REGION 1..46: note = Capture domain
LAEAKVLANRELDKYGVSDYYKNLINNAKTVEGVKALIDEILAALP

SEQ ID NO: 143 - protein, 800 aa, synthetic construct
  REGION 1..800: note = elastin-like polypeptide
  VARIANT 61..800: note = May be present or absent in groups of the repeat unit Gly Val GlyVal Pro
GVGVPGVGVPGVGVPGVGVPGVGVPGVGVPGVGVPGVGVPGVGVPGVGVPGVGVPGVGVPGVGVPGVGVPGVGVPGVGVPGVGVPGVGVPGVGVPGVGVPGVGVPGVGVPGVGVPGVGVPGVGVPGVGVPGVGVPGVGVPGVGVPGVGVPGVGVPGVGVPGVGVPGVGVPGVGVPGVGVPGVGVPGVGVPGVGVPGVGVPGVGVPGVGVPGVGVPGVGVPGVGVPGVGVPGVGVPGVGVPGVGVPGVGVPGVGVPGVGVPGVGVPGVGVPGVGVPGVGVPGVGVPGVGVPGVGVPGVGVPGVGVPGVGVPGVGVPGVGVPGVGVPGVGVPGVGVPGVGVPGVGVPGVGVPGVGVPGVGVPGVGVPGVGVPGVGVPGVGVPGVGVPGVGVPGVGVPGVGVPGVGVPGVGVPGVGVPGVGVPGVGVPGVGVPGVGVPGVGVPGVGVPGVGVPGVGVPGVGVPGVGVPGVGVPGVGVPGVGVPGVGVPGVGVPGVGVPGVGVPGVGVPGVGVPGVGVPGVGVPGVGVPGVGVPGVGVPGVGVPGVGVPGVGVPGVGVPGVGVPGVGVPGVGVPGVGVPGVGVPGVGVPGVGVPGVGVPGVGVPGVGVPGVGVPGVGVPGVGVPGVGVPGVGVPGVGVPGVGVPGVGVPGVGVPGVGVPGVGVPGVGVPGVGVPGVGVPGVGVPGVGVPGVGVPGVGVPGVGVPGVGVPGVGVPGVGVPGVGVPGVGVPGVGVPGVGVPGVGVPGVGVPGVGVPGVGVPGVGVPGVGVPGVGVPGVGVPGVGVPGVGVPGVGVPGVGVPGVGVP

SEQ ID NO: 144 - protein, 800 aa, synthetic construct
  REGION 1..800: note = elastin-like polypeptide
  VARIANT 51..800: note = May be present or absent in groups of the repeat unit Gly Val GlyVal Pro Gly Val Gly Val Pro Gly Ala Gly Val Pro Gly Val Gly ValPro Gly Val Gly Val Pro
GVGVPGVGVPGAGVPGVGVPGVGVPGVGVPGVGVPGAGVPGVGVPGVGVPGVGVPGVGVPGAGVPGVGVPGVGVPGVGVPGVGVPGAGVPGVGVPGVGVPGVGVPGVGVPGAGVPGVGVPGVGVPGVGVPGVGVPGAGVPGVGVPGVGVPGVGVPGVGVPGAGVPGVGVPGVGVPGVGVPGVGVPGAGVPGVGVPGVGVPGVGVPGVGVPGAGVPGVGVPGVGVPGVGVPGVGVPGAGVPGVGVPGVGVPGVGVPGVGVPGAGVPGVGVPGVGVPGVGVPGVGVPGAGVPGVGVPGVGVPGVGVPGVGVPGAGVPGVGVPGVGVPGVGVPGVGVPGAGVPGVGVPGVGVPGVGVPGVGVPGAGVPGVGVPGVGVPGVGVPGVGVPGAGVPGVGVPGVGVPGVGVPGVGVPGAGVPGVGVPGVGVPGVGVPGVGVPGAGVPGVGVPGVGVPGVGVPGVGVPGAGVPGVGVPGVGVPGVGVPGVGVPGAGVPGVGVPGVGVPGVGVPGVGVPGAGVPGVGVPGVGVPGVGVPGVGVPGAGVPGVGVPGVGVPGVGVPGVGVPGAGVPGVGVPGVGVPGVGVPGVGVPGAGVPGVGVPGVGVPGVGVPGVGVPGAGVPGVGVPGVGVPGVGVPGVGVPGAGVPGVGVPGVGVPGVGVPGVGVPGAGVPGVGVPGVGVPGVGVPGVGVPGAGVPGVGVPGVGVPGVGVPGVGVPGAGVPGVGVPGVGVPGVGVPGVGVPGAGVPGVGVPGVGVPGVGVPGVGVPGAGVPGVGVPGVGVPGVGVPGVGVPGAGVPGVGVPGVGVP

SEQ ID NO: 145 - protein, 800 aa, synthetic construct
  REGION 1..800: note = elastin-like polypeptide
  VARIANT 51..800: note = May be present or absent in groups of the repeat unit Gly Val GlyVal Pro Gly Ala Gly Val Pro
GVGVPGAGVPGVGVPGAGVPGVGVPGAGVPGVGVPGAGVPGVGVPGAGVPGVGVPGAGVPGVGVPGAGVPGVGVPGAGVPGVGVPGAGVPGVGVPGAGVPGVGVPGAGVPGVGVPGAGVPGVGVPGAGVPGVGVPGAGVPGVGVPGAGVPGVGVPGAGVPGVGVPGAGVPGVGVPGAGVPGVGVPGAGVPGVGVPGAGVPGVGVPGAGVPGVGVPGAGVPGVGVPGAGVPGVGVPGAGVPGVGVPGAGVPGVGVPGAGVPGVGVPGAGVPGVGVPGAGVPGVGVPGAGVPGVGVPGAGVPGVGVPGAGVPGVGVPGAGVPGVGVPGAGVPGVGVPGAGVPGVGVPGAGVPGVGVPGAGVPGVGVPGAGVPGVGVPGAGVPGVGVPGAGVPGVGVPGAGVPGVGVPGAGVPGVGVPGAGVPGVGVPGAGVPGVGVPGAGVPGVGVPGAGVPGVGVPGAGVPGVGVPGAGVPGVGVPGAGVPGVGVPGAGVPGVGVPGAGVPGVGVPGAGVPGVGVPGAGVPGVGVPGAGVPGVGVPGAGVPGVGVPGAGVPGVGVPGAGVPGVGVPGAGVPGVGVPGAGVPGVGVPGAGVPGVGVPGAGVPGVGVPGAGVPGVGVPGAGVPGVGVPGAGVPGVGVPGAGVPGVGVPGAGVPGVGVPGAGVPGVGVPGAGVPGVGVPGAGVPGVGVPGAGVPGVGVPGAGVPGVGVPGAGVPGVGVPGAGVPGVGVPGAGVPGVGVPGAGVPGVGVPGAGVPGVGVPGAGVPGVGVPGAGVPGVGVPGAGVPGVGVPGAGVPGVGVPGAGVP

SEQ ID NO: 146 - protein, 800 aa, synthetic construct
  REGION 1..800: note = elastin-like polypeptide
  VARIANT 51..800: note = May be present or absent in groups of the repeat unit Gly Val GlyVal Pro Gly Val Gly Val Pro Gly Leu Gly Val Pro Gly Val Gly ValPro Gly Val Gly Val Pro
GVGVPGVGVPGLGVPGVGVPGVGVPGVGVPGVGVPGLGVPGVGVPGVGVPGVGVPGVGVPGLGVPGVGVPGVGVPGVGVPGVGVPGLGVPGVGVPGVGVPGVGVPGVGVPGLGVPGVGVPGVGVPGVGVPGVGVPGLGVPGVGVPGVGVPGVGVPGVGVPGLGVPGVGVPGVGVPGVGVPGVGVPGLGVPGVGVPGVGVPGVGVPGVGVPGLGVPGVGVPGVGVPGVGVPGVGVPGLGVPGVGVPGVGVPGVGVPGVGVPGLGVPGVGVPGVGVPGVGVPGVGVPGLGVPGVGVPGVGVPGVGVPGVGVPGLGVPGVGVPGVGVPGVGVPGVGVPGLGVPGVGVPGVGVPGVGVPGVGVPGLGVPGVGVPGVGVPGVGVPGVGVPGLGVPGVGVPGVGVPGVGVPGVGVPGLGVPGVGVPGVGVPGVGVPGVGVPGLGVPGVGVPGVGVPGVGVPGVGVPGLGVPGVGVPGVGVPGVGVPGVGVPGLGVPGVGVPGVGVPGVGVPGVGVPGLGVPGVGVPGVGVPGVGVPGVGVPGLGVPGVGVPGVGVPGVGVPGVGVPGLGVPGVGVPGVGVPGVGVPGVGVPGLGVPGVGVPGVGVPGVGVPGVGVPGLGVPGVGVPGVGVPGVGVPGVGVPGLGVPGVGVPGVGVPGVGVPGVGVPGLGVPGVGVPGVGVPGVGVPGVGVPGLGVPGVGVPGVGVPGVGVPGVGVPGLGVPGVGVPGVGVPGVGVPGVGVPGLGVPGVGVPGVGVPGVGVPGVGVPGLGVPGVGVPGVGVPGVGVPGVGVPGLGVPGVGVPGVGVP

SEQ ID NO: 147 - protein, 800 aa, synthetic construct
  REGION 1..800: note = elastin-like polypeptide
  VARIANT 2: note = Xaa can be Gly, Ala, Val, Ile, Leu, Phe, Tyr, Trp, Lys, Arg, Asp,Glu or Ser
  VARIANT 7: note = Xaa can be Gly, Ala, Val, Ile, Leu, Phe, Tyr, Trp, Lys, Arg, Asp,Glu or Ser
  VARIANT 12: note = Xaa can be Gly, Ala, Val, Ile, Leu, Phe, Tyr, Trp, Lys, Arg, Asp,Glu or Ser
  VARIANT 17: note = Xaa can be Gly, Ala, Val, Ile, Leu, Phe, Tyr, Trp, Lys, Arg, Asp,Glu or Ser
  VARIANT 22: note = Xaa can be Gly, Ala, Val, Ile, Leu, Phe, Tyr, Trp, Lys, Arg, Asp,Glu or Ser
  VARIANT 27: note = Xaa can be Gly, Ala, Val, Ile, Leu, Phe, Tyr, Trp, Lys, Arg, Asp,Glu or Ser
  VARIANT 32: note = Xaa can be Gly, Ala, Val, Ile, Leu, Phe, Tyr, Trp, Lys, Arg, Asp,Glu or Ser
  VARIANT 37: note = Xaa can be Gly, Ala, Val, Ile, Leu, Phe, Tyr, Trp, Lys, Arg, Asp,Glu or Ser
  VARIANT 42: note = Xaa can be Gly, Ala, Val, Ile, Leu, Phe, Tyr, Trp, Lys, Arg, Asp,Glu or Ser
  VARIANT 47: note = Xaa can be Gly, Ala, Val, Ile, Leu, Phe, Tyr, Trp, Lys, Arg, Asp,Glu or Ser
  VARIANT 51..800: note = May be present or absent in groups of the repeat unit Gly Xaa GlyVal Pro
  VARIANT 52: note = Xaa can be Gly, Ala, Val, Ile, Leu, Phe, Tyr, Trp, Lys, Arg, Asp,Glu or Ser
  VARIANT 57: note = Xaa can be Gly, Ala, Val, Ile, Leu, Phe, Tyr, Trp, Lys, Arg, Asp,Glu or Ser
  VARIANT 62: note = Xaa can be Gly, Ala, Val, Ile, Leu, Phe, Tyr, Trp, Lys, Arg, Asp,Glu or Ser
  VARIANT 67: note = Xaa can be Gly, Ala, Val, Ile, Leu, Phe, Tyr, Trp, Lys, Arg, Asp,Glu or Ser
  VARIANT 72: note = Xaa can be Gly, Ala, Val, Ile, Leu, Phe, Tyr, Trp, Lys, Arg, Asp,Glu or Ser
  VARIANT 77: note = Xaa can be Gly, Ala, Val, Ile, Leu, Phe, Tyr, Trp, Lys, Arg, Asp,Glu or Ser
  VARIANT 82: note = Xaa can be Gly, Ala, Val, Ile, Leu, Phe, Tyr, Trp, Lys, Arg, Asp,Glu or Ser
  VARIANT 87: note = Xaa can be Gly, Ala, Val, Ile, Leu, Phe, Tyr, Trp, Lys, Arg, Asp,Glu or Ser
  VARIANT 92: note = Xaa can be Gly, Ala, Val, Ile, Leu, Phe, Tyr, Trp, Lys, Arg, Asp,Glu or Ser
  VARIANT 97: note = Xaa can be Gly, Ala, Val, Ile, Leu, Phe, Tyr, Trp, Lys, Arg, Asp,Glu or Ser
  VARIANT 102: note = Xaa can be Gly, Ala, Val, Ile, Leu, Phe, Tyr, Trp, Lys, Arg, Asp,Glu or Ser
  VARIANT 107: note = Xaa can be Gly, Ala, Val, Ile, Leu, Phe, Tyr, Trp, Lys, Arg, Asp,Glu or Ser
  VARIANT 112: note = Xaa can be Gly, Ala, Val, Ile, Leu, Phe, Tyr, Trp, Lys, Arg, Asp,Glu or Ser
  VARIANT 117: note = Xaa can be Gly, Ala, Val, Ile, Leu, Phe, Tyr, Trp, Lys, Arg, Asp,Glu or Ser
  VARIANT 122: note = Xaa can be Gly, Ala, Val, Ile, Leu, Phe, Tyr, Trp, Lys, Arg, Asp,Glu or Ser
  VARIANT 127: note = Xaa can be Gly, Ala, Val, Ile, Leu, Phe, Tyr, Trp, Lys, Arg, Asp,Glu or Ser
  VARIANT 132: note = Xaa can be Gly, Ala, Val, Ile, Leu, Phe, Tyr, Trp, Lys, Arg, Asp,Glu or Ser
  VARIANT 137: note = Xaa can be Gly, Ala, Val, Ile, Leu, Phe, Tyr, Trp, Lys, Arg, Asp,Glu or Ser
  VARIANT 142: note = Xaa can be Gly, Ala, Val, Ile, Leu, Phe, Tyr, Trp, Lys, Arg, Asp,Glu or Ser
  VARIANT 147: note = Xaa can be Gly, Ala, Val, Ile, Leu, Phe, Tyr, Trp, Lys, Arg, Asp,Glu or Ser
  VARIANT 152: note = Xaa can be Gly, Ala, Val, Ile, Leu, Phe, Tyr, Trp, Lys, Arg, Asp,Glu or Ser
  VARIANT 157: note = Xaa can be Gly, Ala, Val, Ile, Leu, Phe, Tyr, Trp, Lys, Arg, Asp,Glu or Ser
  VARIANT 162: note = Xaa can be Gly, Ala, Val, Ile, Leu, Phe, Tyr, Trp, Lys, Arg, Asp,Glu or Ser
  VARIANT 167: note = Xaa can be Gly, Ala, Val, Ile, Leu, Phe, Tyr, Trp, Lys, Arg, Asp,Glu or Ser
  VARIANT 172: note = Xaa can be Gly, Ala, Val, Ile, Leu, Phe, Tyr, Trp, Lys, Arg, Asp,Glu or Ser
  VARIANT 177: note = Xaa can be Gly, Ala, Val, Ile, Leu, Phe, Tyr, Trp, Lys, Arg, Asp,Glu or Ser
  VARIANT 182: note = Xaa can be Gly, Ala, Val, Ile, Leu, Phe, Tyr, Trp, Lys, Arg, Asp,Glu or Ser
  VARIANT 187: note = Xaa can be Gly, Ala, Val, Ile, Leu, Phe, Tyr, Trp, Lys, Arg, Asp,Glu or Ser
  VARIANT 192: note = Xaa can be Gly, Ala, Val, Ile, Leu, Phe, Tyr, Trp, Lys, Arg, Asp,Glu or Ser
  VARIANT 197: note = Xaa can be Gly, Ala, Val, Ile, Leu, Phe, Tyr, Trp, Lys, Arg, Asp,Glu or Ser
  VARIANT 202: note = Xaa can be Gly, Ala, Val, Ile, Leu, Phe, Tyr, Trp, Lys, Arg, Asp,Glu or Ser
  VARIANT 207: note = Xaa can be Gly, Ala, Val, Ile, Leu, Phe, Tyr, Trp, Lys, Arg, Asp,Glu or Ser
  VARIANT 212: note = Xaa can be Gly, Ala, Val, Ile, Leu, Phe, Tyr, Trp, Lys, Arg, Asp,Glu or Ser
  VARIANT 217: note = Xaa can be Gly, Ala, Val, Ile, Leu, Phe, Tyr, Trp, Lys, Arg, Asp,Glu or Ser
  VARIANT 222: note = Xaa can be Gly, Ala, Val, Ile, Leu, Phe, Tyr, Trp, Lys, Arg, Asp,Glu or Ser
  VARIANT 227: note = Xaa can be Gly, Ala, Val, Ile, Leu, Phe, Tyr, Trp, Lys, Arg, Asp,Glu or Ser
  VARIANT 232: note = Xaa can be Gly, Ala, Val, Ile, Leu, Phe, Tyr, Trp, Lys, Arg, Asp,Glu or Ser
  VARIANT 237: note = Xaa can be Gly, Ala, Val, Ile, Leu, Phe, Tyr, Trp, Lys, Arg, Asp,Glu or Ser
  VARIANT 242: note = Xaa can be Gly, Ala, Val, Ile, Leu, Phe, Tyr, Trp, Lys, Arg, Asp,Glu or Ser
  VARIANT 247: note = Xaa can be Gly, Ala, Val, Ile, Leu, Phe, Tyr, Trp, Lys, Arg, Asp,Glu or Ser
  VARIANT 252: note = Xaa can be Gly, Ala, Val, Ile, Leu, Phe, Tyr, Trp, Lys, Arg, Asp,Glu or Ser
  VARIANT 257: note = Xaa can be Gly, Ala, Val, Ile, Leu, Phe, Tyr, Trp, Lys, Arg, Asp,Glu or Ser
  VARIANT 262: note = Xaa can be Gly, Ala, Val, Ile, Leu, Phe, Tyr, Trp, Lys, Arg, Asp,Glu or Ser
  VARIANT 267: note = Xaa can be Gly, Ala, Val, Ile, Leu, Phe, Tyr, Trp, Lys, Arg, Asp,Glu or Ser
  VARIANT 272: note = Xaa can be Gly, Ala, Val, Ile, Leu, Phe, Tyr, Trp, Lys, Arg, Asp,Glu or Ser
  VARIANT 277: note = Xaa can be Gly, Ala, Val, Ile, Leu, Phe, Tyr, Trp, Lys, Arg, Asp,Glu or Ser
  VARIANT 282: note = Xaa can be Gly, Ala, Val, Ile, Leu, Phe, Tyr, Trp, Lys, Arg, Asp,Glu or Ser
  VARIANT 287: note = Xaa can be Gly, Ala, Val, Ile, Leu, Phe, Tyr, Trp, Lys, Arg, Asp,Glu or Ser
  VARIANT 292: note = Xaa can be Gly, Ala, Val, Ile, Leu, Phe, Tyr, Trp, Lys, Arg, Asp,Glu or Ser
  VARIANT 297: note = Xaa can be Gly, Ala, Val, Ile, Leu, Phe, Tyr, Trp, Lys, Arg, Asp,Glu or Ser
  VARIANT 302: note = Xaa can be Gly, Ala, Val, Ile, Leu, Phe, Tyr, Trp, Lys, Arg, Asp,Glu or Ser
  VARIANT 307: note = Xaa can be Gly, Ala, Val, Ile, Leu, Phe, Tyr, Trp, Lys, Arg, Asp,Glu or Ser
  VARIANT 312: note = Xaa can be Gly, Ala, Val, Ile, Leu, Phe, Tyr, Trp, Lys, Arg, Asp,Glu or Ser
  VARIANT 317: note = Xaa can be Gly, Ala, Val, Ile, Leu, Phe, Tyr, Trp, Lys, Arg, Asp,Glu or Ser
  VARIANT 322: note = Xaa can be Gly, Ala, Val, Ile, Leu, Phe, Tyr, Trp, Lys, Arg, Asp,Glu or Ser
  VARIANT 327: note = Xaa can be Gly, Ala, Val, Ile, Leu, Phe, Tyr, Trp, Lys, Arg, Asp,Glu or Ser
  VARIANT 332: note = Xaa can be Gly, Ala, Val, Ile, Leu, Phe, Tyr, Trp, Lys, Arg, Asp,Glu or Ser
  VARIANT 337: note = Xaa can be Gly, Ala, Val, Ile, Leu, Phe, Tyr, Trp, Lys, Arg, Asp,Glu or Ser
  VARIANT 342: note = Xaa can be Gly, Ala, Val, Ile, Leu, Phe, Tyr, Trp, Lys, Arg, Asp,Glu or Ser
  VARIANT 347: note = Xaa can be Gly, Ala, Val, Ile, Leu, Phe, Tyr, Trp, Lys, Arg, Asp,Glu or Ser
  VARIANT 352: note = Xaa can be Gly, Ala, Val, Ile, Leu, Phe, Tyr, Trp, Lys, Arg, Asp,Glu or Ser
  VARIANT 357: note = Xaa can be Gly, Ala, Val, Ile, Leu, Phe, Tyr, Trp, Lys, Arg, Asp,Glu or Ser
  VARIANT 362: note = Xaa can be Gly, Ala, Val, Ile, Leu, Phe, Tyr, Trp, Lys, Arg, Asp,Glu or Ser
  VARIANT 367: note = Xaa can be Gly, Ala, Val, Ile, Leu, Phe, Tyr, Trp, Lys, Arg, Asp,Glu or Ser
  VARIANT 372: note = Xaa can be Gly, Ala, Val, Ile, Leu, Phe, Tyr, Trp, Lys, Arg, Asp,Glu or Ser
  VARIANT 377: note = Xaa can be Gly, Ala, Val, Ile, Leu, Phe, Tyr, Trp, Lys, Arg, Asp,Glu or Ser
  VARIANT 382: note = Xaa can be Gly, Ala, Val, Ile, Leu, Phe, Tyr, Trp, Lys, Arg, Asp,Glu or Ser
  VARIANT 387: note = Xaa can be Gly, Ala, Val, Ile, Leu, Phe, Tyr, Trp, Lys, Arg, Asp,Glu or Ser
  VARIANT 392: note = Xaa can be Gly, Ala, Val, Ile, Leu, Phe, Tyr, Trp, Lys, Arg, Asp,Glu or Ser
  VARIANT 397: note = Xaa can be Gly, Ala, Val, Ile, Leu, Phe, Tyr, Trp, Lys, Arg, Asp,Glu or Ser
  VARIANT 402: note = Xaa can be Gly, Ala, Val, Ile, Leu, Phe, Tyr, Trp, Lys, Arg, Asp,Glu or Ser
  VARIANT 407: note = Xaa can be Gly, Ala, Val, Ile, Leu, Phe, Tyr, Trp, Lys, Arg, Asp,Glu or Ser
  VARIANT 412: note = Xaa can be Gly, Ala, Val, Ile, Leu, Phe, Tyr, Trp, Lys, Arg, Asp,Glu or Ser
  VARIANT 417: note = Xaa can be Gly, Ala, Val, Ile, Leu, Phe, Tyr, Trp, Lys, Arg, Asp,Glu or Ser
  VARIANT 422: note = Xaa can be Gly, Ala, Val, Ile, Leu, Phe, Tyr, Trp, Lys, Arg, Asp,Glu or Ser
  VARIANT 427: note = Xaa can be Gly, Ala, Val, Ile, Leu, Phe, Tyr, Trp, Lys, Arg, Asp,Glu or Ser
  VARIANT 432: note = Xaa can be Gly, Ala, Val, Ile, Leu, Phe, Tyr, Trp, Lys, Arg, Asp,Glu or Ser
  VARIANT 437: note = Xaa can be Gly, Ala, Val, Ile, Leu, Phe, Tyr, Trp, Lys, Arg, Asp,Glu or Ser
  VARIANT 442: note = Xaa can be Gly, Ala, Val, Ile, Leu, Phe, Tyr, Trp, Lys, Arg, Asp,Glu or Ser
  VARIANT 447: note = Xaa can be Gly, Ala, Val, Ile, Leu, Phe, Tyr, Trp, Lys, Arg, Asp,Glu or Ser
  VARIANT 452: note = Xaa can be Gly, Ala, Val, Ile, Leu, Phe, Tyr, Trp, Lys, Arg, Asp,Glu or Ser
  VARIANT 457: note = Xaa can be Gly, Ala, Val, Ile, Leu, Phe, Tyr, Trp, Lys, Arg, Asp,Glu or Ser
  VARIANT 462: note = Xaa can be Gly, Ala, Val, Ile, Leu, Phe, Tyr, Trp, Lys, Arg, Asp,Glu or Ser
  VARIANT 467: note = Xaa can be Gly, Ala, Val, Ile, Leu, Phe, Tyr, Trp, Lys, Arg, Asp,Glu or Ser
  VARIANT 472: note = Xaa can be Gly, Ala, Val, Ile, Leu, Phe, Tyr, Trp, Lys, Arg, Asp,Glu or Ser
  VARIANT 477: note = Xaa can be Gly, Ala, Val, Ile, Leu, Phe, Tyr, Trp, Lys, Arg, Asp,Glu or Ser
  VARIANT 482: note = Xaa can be Gly, Ala, Val, Ile, Leu, Phe, Tyr, Trp, Lys, Arg, Asp,Glu or Ser
  VARIANT 487: note = Xaa can be Gly, Ala, Val, Ile, Leu, Phe, Tyr, Trp, Lys, Arg, Asp,Glu or Ser
  VARIANT 492: note = Xaa can be Gly, Ala, Val, Ile, Leu, Phe, Tyr, Trp, Lys, Arg, Asp,Glu or Ser
  VARIANT 497: note = Xaa can be Gly, Ala, Val, Ile, Leu, Phe, Tyr, Trp, Lys, Arg, Asp,Glu or Ser
  VARIANT 502: note = Xaa can be Gly, Ala, Val, Ile, Leu, Phe, Tyr, Trp, Lys, Arg, Asp,Glu or Ser
  VARIANT 507: note = Xaa can be Gly, Ala, Val, Ile, Leu, Phe, Tyr, Trp, Lys, Arg, Asp,Glu or Ser
  VARIANT 512: note = Xaa can be Gly, Ala, Val, Ile, Leu, Phe, Tyr, Trp, Lys, Arg, Asp,Glu or Ser
  VARIANT 517: note = Xaa can be Gly, Ala, Val, Ile, Leu, Phe, Tyr, Trp, Lys, Arg, Asp,Glu or Ser
  VARIANT 522: note = Xaa can be Gly, Ala, Val, Ile, Leu, Phe, Tyr, Trp, Lys, Arg, Asp,Glu or Ser
  VARIANT 527: note = Xaa can be Gly, Ala, Val, Ile, Leu, Phe, Tyr, Trp, Lys, Arg, Asp,Glu or Ser
  VARIANT 532: note = Xaa can be Gly, Ala, Val, Ile, Leu, Phe, Tyr, Trp, Lys, Arg, Asp,Glu or Ser
  VARIANT 537: note = Xaa can be Gly, Ala, Val, Ile, Leu, Phe, Tyr, Trp, Lys, Arg, Asp,Glu or Ser
  VARIANT 542: note = Xaa can be Gly, Ala, Val, Ile, Leu, Phe, Tyr, Trp, Lys, Arg, Asp,Glu or Ser
  VARIANT 547: note = Xaa can be Gly, Ala, Val, Ile, Leu, Phe, Tyr, Trp, Lys, Arg, Asp,Glu or Ser
  VARIANT 552: note = Xaa can be Gly, Ala, Val, Ile, Leu, Phe, Tyr, Trp, Lys, Arg, Asp,Glu or Ser
  VARIANT 557: note = Xaa can be Gly, Ala, Val, Ile, Leu, Phe, Tyr, Trp, Lys, Arg, Asp,Glu or Ser
  VARIANT 562: note = Xaa can be Gly, Ala, Val, Ile, Leu, Phe, Tyr, Trp, Lys, Arg, Asp,Glu or Ser
  VARIANT 567: note = Xaa can be Gly, Ala, Val, Ile, Leu, Phe, Tyr, Trp, Lys, Arg, Asp,Glu or Ser
  VARIANT 572: note = Xaa can be Gly, Ala, Val, Ile, Leu, Phe, Tyr, Trp, Lys, Arg, Asp,Glu or Ser
  VARIANT 577: note = Xaa can be Gly, Ala, Val, Ile, Leu, Phe, Tyr, Trp, Lys, Arg, Asp,Glu or Ser
  VARIANT 582: note = Xaa can be Gly, Ala, Val, Ile, Leu, Phe, Tyr, Trp, Lys, Arg, Asp,Glu or Ser
  VARIANT 587: note = Xaa can be Gly, Ala, Val, Ile, Leu, Phe, Tyr, Trp, Lys, Arg, Asp,Glu or Ser
  VARIANT 592: note = Xaa can be Gly, Ala, Val, Ile, Leu, Phe, Tyr, Trp, Lys, Arg, Asp,Glu or Ser
  VARIANT 597: note = Xaa can be Gly, Ala, Val, Ile, Leu, Phe, Tyr, Trp, Lys, Arg, Asp,Glu or Ser
  VARIANT 602: note = Xaa can be Gly, Ala, Val, Ile, Leu, Phe, Tyr, Trp, Lys, Arg, Asp,Glu or Ser
  VARIANT 607: note = Xaa can be Gly, Ala, Val, Ile, Leu, Phe, Tyr, Trp, Lys, Arg, Asp,Glu or Ser
  VARIANT 612: note = Xaa can be Gly, Ala, Val, Ile, Leu, Phe, Tyr, Trp, Lys, Arg, Asp,Glu or Ser
  VARIANT 617: note = Xaa can be Gly, Ala, Val, Ile, Leu, Phe, Tyr, Trp, Lys, Arg, Asp,Glu or Ser
  VARIANT 622: note = Xaa can be Gly, Ala, Val, Ile, Leu, Phe, Tyr, Trp, Lys, Arg, Asp,Glu or Ser
  VARIANT 627: note = Xaa can be Gly, Ala, Val, Ile, Leu, Phe, Tyr, Trp, Lys, Arg, Asp,Glu or Ser
  VARIANT 632: note = Xaa can be Gly, Ala, Val, Ile, Leu, Phe, Tyr, Trp, Lys, Arg, Asp,Glu or Ser
  VARIANT 637: note = Xaa can be Gly, Ala, Val, Ile, Leu, Phe, Tyr, Trp, Lys, Arg, Asp,Glu or Ser
  VARIANT 642: note = Xaa can be Gly, Ala, Val, Ile, Leu, Phe, Tyr, Trp, Lys, Arg, Asp,Glu or Ser
  VARIANT 647: note = Xaa can be Gly, Ala, Val, Ile, Leu, Phe, Tyr, Trp, Lys, Arg, Asp,Glu or Ser
  VARIANT 652: note = Xaa can be Gly, Ala, Val, Ile, Leu, Phe, Tyr, Trp, Lys, Arg, Asp,Glu or Ser
  VARIANT 657: note = Xaa can be Gly, Ala, Val, Ile, Leu, Phe, Tyr, Trp, Lys, Arg, Asp,Glu or Ser
  VARIANT 662: note = Xaa can be Gly, Ala, Val, Ile, Leu, Phe, Tyr, Trp, Lys, Arg, Asp,Glu or Ser
  VARIANT 667: note = Xaa can be Gly, Ala, Val, Ile, Leu, Phe, Tyr, Trp, Lys, Arg, Asp,Glu or Ser
  VARIANT 672: note = Xaa can be Gly, Ala, Val, Ile, Leu, Phe, Tyr, Trp, Lys, Arg, Asp,Glu or Ser
  VARIANT 677: note = Xaa can be Gly, Ala, Val, Ile, Leu, Phe, Tyr, Trp, Lys, Arg, Asp,Glu or Ser
  VARIANT 682: note = Xaa can be Gly, Ala, Val, Ile, Leu, Phe, Tyr, Trp, Lys, Arg, Asp,Glu or Ser
  VARIANT 687: note = Xaa can be Gly, Ala, Val, Ile, Leu, Phe, Tyr, Trp, Lys, Arg, Asp,Glu or Ser
  VARIANT 692: note = Xaa can be Gly, Ala, Val, Ile, Leu, Phe, Tyr, Trp, Lys, Arg, Asp,Glu or Ser
  VARIANT 697: note = Xaa can be Gly, Ala, Val, Ile, Leu, Phe, Tyr, Trp, Lys, Arg, Asp,Glu or Ser
  VARIANT 702: note = Xaa can be Gly, Ala, Val, Ile, Leu, Phe, Tyr, Trp, Lys, Arg, Asp,Glu or Ser
  VARIANT 707: note = Xaa can be Gly, Ala, Val, Ile, Leu, Phe, Tyr, Trp, Lys, Arg, Asp,Glu or Ser
  VARIANT 712: note = Xaa can be Gly, Ala, Val, Ile, Leu, Phe, Tyr, Trp, Lys, Arg, Asp,Glu or Ser
  VARIANT 717: note = Xaa can be Gly, Ala, Val, Ile, Leu, Phe, Tyr, Trp, Lys, Arg, Asp,Glu or Ser
  VARIANT 722: note = Xaa can be Gly, Ala, Val, Ile, Leu, Phe, Tyr, Trp, Lys, Arg, Asp,Glu or Ser
  VARIANT 727: note = Xaa can be Gly, Ala, Val, Ile, Leu, Phe, Tyr, Trp, Lys, Arg, Asp,Glu or Ser
  VARIANT 732: note = Xaa can be Gly, Ala, Val, Ile, Leu, Phe, Tyr, Trp, Lys, Arg, Asp,Glu or Ser
  VARIANT 737: note = Xaa can be Gly, Ala, Val, Ile, Leu, Phe, Tyr, Trp, Lys, Arg, Asp,Glu or Ser
  VARIANT 742: note = Xaa can be Gly, Ala, Val, Ile, Leu, Phe, Tyr, Trp, Lys, Arg, Asp,Glu or Ser
  VARIANT 747: note = Xaa can be Gly, Ala, Val, Ile, Leu, Phe, Tyr, Trp, Lys, Arg, Asp,Glu or Ser
  VARIANT 752: note = Xaa can be Gly, Ala, Val, Ile, Leu, Phe, Tyr, Trp, Lys, Arg, Asp,Glu or Ser
  VARIANT 757: note = Xaa can be Gly, Ala, Val, Ile, Leu, Phe, Tyr, Trp, Lys, Arg, Asp,Glu or Ser
  VARIANT 762: note = Xaa can be Gly, Ala, Val, Ile, Leu, Phe, Tyr, Trp, Lys, Arg, Asp,Glu or Ser
  VARIANT 767: note = Xaa can be Gly, Ala, Val, Ile, Leu, Phe, Tyr, Trp, Lys, Arg, Asp,Glu or Ser
  VARIANT 772: note = Xaa can be Gly, Ala, Val, Ile, Leu, Phe, Tyr, Trp, Lys, Arg, Asp,Glu or Ser
  VARIANT 777: note = Xaa can be Gly, Ala, Val, Ile, Leu, Phe, Tyr, Trp, Lys, Arg, Asp,Glu or Ser
  VARIANT 782: note = Xaa can be Gly, Ala, Val, Ile, Leu, Phe, Tyr, Trp, Lys, Arg, Asp,Glu or Ser
  VARIANT 787: note = Xaa can be Gly, Ala, Val, Ile, Leu, Phe, Tyr, Trp, Lys, Arg, Asp,Glu or Ser
  VARIANT 792: note = Xaa can be Gly, Ala, Val, Ile, Leu, Phe, Tyr, Trp, Lys, Arg, Asp,Glu or Ser
  VARIANT 797: note = Xaa can be Gly, Ala, Val, Ile, Leu, Phe, Tyr, Trp, Lys, Arg, Asp,Glu or Ser
GXGVPGXGVPGXGVPGXGVPGXGVPGXGVPGXGVPGXGVPGXGVPGXGVPGXGVPGXGVPGXGVPGXGVPGXGVPGXGVPGXGVPGXGVPGXGVPGXGVPGXGVPGXGVPGXGVPGXGVPGXGVPGXGVPGXGVPGXGVPGXGVPGXGVPGXGVPGXGVPGXGVPGXGVPGXGVPGXGVPGXGVPGXGVPGXGVPGXGVPGXGVPGXGVPGXGVPGXGVPGXGVPGXGVPGXGVPGXGVPGXGVPGXGVPGXGVPGXGVPGXGVPGXGVPGXGVPGXGVPGXGVPGXGVPGXGVPGXGVPGXGVPGXGVPGXGVPGXGVPGXGVPGXGVPGXGVPGXGVPGXGVPGXGVPGXGVPGXGVPGXGVPGXGVPGXGVPGXGVPGXGVPGXGVPGXGVPGXGVPGXGVPGXGVPGXGVPGXGVPGXGVPGXGVPGXGVPGXGVPGXGVPGXGVPGXGVPGXGVPGXGVPGXGVPGXGVPGXGVPGXGVPGXGVPGXGVPGXGVPGXGVPGXGVPGXGVPGXGVPGXGVPGXGVPGXGVPGXGVPGXGVPGXGVPGXGVPGXGVPGXGVPGXGVPGXGVPGXGVPGXGVPGXGVPGXGVPGXGVPGXGVPGXGVPGXGVPGXGVPGXGVPGXGVPGXGVPGXGVPGXGVPGXGVPGXGVPGXGVPGXGVPGXGVPGXGVPGXGVPGXGVPGXGVPGXGVPGXGVPGXGVPGXGVPGXGVPGXGVPGXGVPGXGVPGXGVPGXGVPGXGVPGXGVPGXGVPGXGVPGXGVPGXGVPGXGVPGXGVPGXGVPGXGVPGXGVPGXGVP

SEQ ID NO: 148 - protein, 1440 aa, synthetic construct
  REGION 1..1440: note = elastin-like polypeptide
  VARIANT 1: note = Xaa can be any naturally occurring amino acid
  VARIANT 2: note = Xaa can be any naturally occurring amino acid
  VARIANT 4: note = Xaa can be any naturally occurring amino acid except Pro or Gly
  VARIANT 5: note = Xaa can be any naturally occurring amino acid except Pro or Gly
  VARIANT 6: note = Xaa can be any naturally occurring amino acid except Pro or Gly
  VARIANT 7: note = Xaa can be any naturally occurring amino acid except Pro or Gly
  VARIANT 9: note = Xaa can be any naturally occurring amino acid
  VARIANT 10: note = Xaa can be any naturally occurring amino acid
  VARIANT 11: note = Xaa can be any naturally occurring amino acid
  VARIANT 13: note = Xaa can be any naturally occurring amino acid except Pro or Gly
  VARIANT 14: note = Xaa can be any naturally occurring amino acid except Pro or Gly
  VARIANT 15: note = Xaa can be any naturally occurring amino acid except Pro or Gly
  VARIANT 16: note = Xaa can be any naturally occurring amino acid except Pro or Gly
  VARIANT 18: note = Xaa can be any naturally occurring amino acid
  VARIANT 19: note = Xaa can be any naturally occurring amino acid
  VARIANT 20: note = Xaa can be any naturally occurring amino acid
  VARIANT 22: note = Xaa can be any naturally occurring amino acid except Pro or Gly
  VARIANT 23: note = Xaa can be any naturally occurring amino acid except Pro or Gly
  VARIANT 24: note = Xaa can be any naturally occurring amino acid except Pro or Gly
  VARIANT 25: note = Xaa can be any naturally occurring amino acid except Pro or Gly
  VARIANT 27: note = Xaa can be any naturally occurring amino acid
  VARIANT 28: note = Xaa can be any naturally occurring amino acid
  VARIANT 29: note = Xaa can be any naturally occurring amino acid
  VARIANT 31: note = Xaa can be any naturally occurring amino acid except Pro or Gly
  VARIANT 32: note = Xaa can be any naturally occurring amino acid except Pro or Gly
  VARIANT 33: note = Xaa can be any naturally occurring amino acid except Pro or Gly
  VARIANT 34: note = Xaa can be any naturally occurring amino acid except Pro or Gly
  VARIANT 36: note = Xaa can be any naturally occurring amino acid
  VARIANT 37: note = Xaa can be any naturally occurring amino acid
  VARIANT 38: note = Xaa can be any naturally occurring amino acid
  VARIANT 40: note = Xaa can be any naturally occurring amino acid except Pro or Gly
  VARIANT 41: note = Xaa can be any naturally occurring amino acid except Pro or Gly
  VARIANT 42: note = Xaa can be any naturally occurring amino acid except Pro or Gly
  VARIANT 43: note = Xaa can be any naturally occurring amino acid except Pro or Gly
  VARIANT 45: note = Xaa can be any naturally occurring amino acid
  VARIANT 46: note = Xaa can be any naturally occurring amino acid
  VARIANT 47: note = Xaa can be any naturally occurring amino acid
  VARIANT 49: note = Xaa can be any naturally occurring amino acid except Pro or Gly
  VARIANT 50: note = Xaa can be any naturally occurring amino acid except Pro or Gly
  VARIANT 51: note = Xaa can be any naturally occurring amino acid except Pro or Gly
  VARIANT 52: note = Xaa can be any naturally occurring amino acid except Pro or Gly
  VARIANT 54: note = Xaa can be any naturally occurring amino acid
  VARIANT 55: note = Xaa can be any naturally occurring amino acid
  VARIANT 56: note = Xaa can be any naturally occurring amino acid
  VARIANT 58: note = Xaa can be any naturally occurring amino acid except Pro or Gly
  VARIANT 59: note = Xaa can be any naturally occurring amino acid except Pro or Gly
  VARIANT 60: note = Xaa can be any naturally occurring amino acid except Pro or Gly
  VARIANT 61: note = Xaa can be any naturally occurring amino acid except Pro or Gly
  VARIANT 63: note = Xaa can be any naturally occurring amino acid
  VARIANT 64: note = Xaa can be any naturally occurring amino acid
  VARIANT 65: note = Xaa can be any naturally occurring amino acid
  VARIANT 67: note = Xaa can be any naturally occurring amino acid except Pro or Gly
  VARIANT 68: note = Xaa can be any naturally occurring amino acid except Pro or Gly
  VARIANT 69: note = Xaa can be any naturally occurring amino acid except Pro or Gly
  VARIANT 70: note = Xaa can be any naturally occurring amino acid except Pro or Gly
  VARIANT 72: note = Xaa can be any naturally occurring amino acid
  VARIANT 73: note = Xaa can be any naturally occurring amino acid
  VARIANT 74: note = Xaa can be any naturally occurring amino acid
  VARIANT 76: note = Xaa can be any naturally occurring amino acid except Pro or Gly
  VARIANT 77: note = Xaa can be any naturally occurring amino acid except Pro or Gly
  VARIANT 78: note = Xaa can be any naturally occurring amino acid except Pro or Gly
  VARIANT 79: note = Xaa can be any naturally occurring amino acid except Pro or Gly
  VARIANT 81: note = Xaa can be any naturally occurring amino acid
  VARIANT 82: note = Xaa can be any naturally occurring amino acid
  VARIANT 83: note = Xaa can be any naturally occurring amino acid
  VARIANT 85: note = Xaa can be any naturally occurring amino acid except Pro or Gly
  VARIANT 86: note = Xaa can be any naturally occurring amino acid except Pro or Gly
  VARIANT 87: note = Xaa can be any naturally occurring amino acid except Pro or Gly
  VARIANT 88: note = Xaa can be any naturally occurring amino acid except Pro or Gly
  VARIANT 90: note = Xaa can be any naturally occurring amino acid
  VARIANT 91..1440: note = May be present or absent in groups of the repeat unit Xaa Xaa ProXaa Xaa Xaa Xaa Gly Xaa
  VARIANT 91: note = Xaa can be any naturally occurring amino acid
  VARIANT 92: note = Xaa can be any naturally occurring amino acid
  VARIANT 94: note = Xaa can be any naturally occurring amino acid except Pro or Gly
  VARIANT 95: note = Xaa can be any naturally occurring amino acid except Pro or Gly
  VARIANT 96: note = Xaa can be any naturally occurring amino acid except Pro or Gly
  VARIANT 97: note = Xaa can be any naturally occurring amino acid except Pro or Gly
  VARIANT 99: note = Xaa can be any naturally occurring amino acid
  VARIANT 100: note = Xaa can be any naturally occurring amino acid
  VARIANT 101: note = Xaa can be any naturally occurring amino acid
  VARIANT 103: note = Xaa can be any naturally occurring amino acid except Pro or Gly
  VARIANT 104: note = Xaa can be any naturally occurring amino acid except Pro or Gly
  VARIANT 105: note = Xaa can be any naturally occurring amino acid except Pro or Gly
  VARIANT 106: note = Xaa can be any naturally occurring amino acid except Pro or Gly
  VARIANT 108: note = Xaa can be any naturally occurring amino acid
  VARIANT 109: note = Xaa can be any naturally occurring amino acid
  VARIANT 110: note = Xaa can be any naturally occurring amino acid
  VARIANT 112: note = Xaa can be any naturally occurring amino acid except Pro or Gly
  VARIANT 113: note = Xaa can be any naturally occurring amino acid except Pro or Gly
  VARIANT 114: note = Xaa can be any naturally occurring amino acid except Pro or Gly
  VARIANT 115: note = Xaa can be any naturally occurring amino acid except Pro or Gly
  VARIANT 117: note = Xaa can be any naturally occurring amino acid
  VARIANT 118: note = Xaa can be any naturally occurring amino acid
  VARIANT 119: note = Xaa can be any naturally occurring amino acid
  VARIANT 121: note = Xaa can be any naturally occurring amino acid except Pro or Gly
  VARIANT 122: note = Xaa can be any naturally occurring amino acid except Pro or Gly
  VARIANT 123: note = Xaa can be any naturally occurring amino acid except Pro or Gly
  VARIANT 124: note = Xaa can be any naturally occurring amino acid except Pro or Gly
  VARIANT 126: note = Xaa can be any naturally occurring amino acid
  VARIANT 127: note = Xaa can be any naturally occurring amino acid
  VARIANT 128: note = Xaa can be any naturally occurring amino acid
  VARIANT 130: note = Xaa can be any naturally occurring amino acid except Pro or Gly
  VARIANT 131: note = Xaa can be any naturally occurring amino acid except Pro or Gly
  VARIANT 132: note = Xaa can be any naturally occurring amino acid except Pro or Gly
  VARIANT 133: note = Xaa can be any naturally occurring amino acid except Pro or Gly
  VARIANT 135: note = Xaa can be any naturally occurring amino acid
  VARIANT 136: note = Xaa can be any naturally occurring amino acid
  VARIANT 137: note = Xaa can be any naturally occurring amino acid
  VARIANT 139: note = Xaa can be any naturally occurring amino acid except Pro or Gly
  VARIANT 140: note = Xaa can be any naturally occurring amino acid except Pro or Gly
  VARIANT 141: note = Xaa can be any naturally occurring amino acid except Pro or Gly
  VARIANT 142: note = Xaa can be any naturally occurring amino acid except Pro or Gly
  VARIANT 144: note = Xaa can be any naturally occurring amino acid
  VARIANT 145: note = Xaa can be any naturally occurring amino acid
  VARIANT 146: note = Xaa can be any naturally occurring amino acid
  VARIANT 148: note = Xaa can be any naturally occurring amino acid except Pro or Gly
  VARIANT 149: note = Xaa can be any naturally occurring amino acid except Pro or Gly
  VARIANT 150: note = Xaa can be any naturally occurring amino acid except Pro or Gly
  VARIANT 151: note = Xaa can be any naturally occurring amino acid except Pro or Gly
  VARIANT 153: note = Xaa can be any naturally occurring amino acid
  VARIANT 154: note = Xaa can be any naturally occurring amino acid
  VARIANT 155: note = Xaa can be any naturally occurring amino acid
  VARIANT 157: note = Xaa can be any naturally occurring amino acid except Pro or Gly
  VARIANT 158: note = Xaa can be any naturally occurring amino acid except Pro or Gly
  VARIANT 159: note = Xaa can be any naturally occurring amino acid except Pro or Gly
  VARIANT 160: note = Xaa can be any naturally occurring amino acid except Pro or Gly
  VARIANT 162: note = Xaa can be any naturally occurring amino acid
  VARIANT 163: note = Xaa can be any naturally occurring amino acid
  VARIANT 164: note = Xaa can be any naturally occurring amino acid
  VARIANT 166: note = Xaa can be any naturally occurring amino acid except Pro or Gly
  VARIANT 167: note = Xaa can be any naturally occurring amino acid except Pro or Gly
  VARIANT 168: note = Xaa can be any naturally occurring amino acid except Pro or Gly
  VARIANT 169: note = Xaa can be any naturally occurring amino acid except Pro or Gly
  VARIANT 171: note = Xaa can be any naturally occurring amino acid
  VARIANT 172: note = Xaa can be any naturally occurring amino acid
  VARIANT 173: note = Xaa can be any naturally occurring amino acid
  VARIANT 175: note = Xaa can be any naturally occurring amino acid except Pro or Gly
  VARIANT 176: note = Xaa can be any naturally occurring amino acid except Pro or Gly
  VARIANT 177: note = Xaa can be any naturally occurring amino acid except Pro or Gly
  VARIANT 178: note = Xaa can be any naturally occurring amino acid except Pro or Gly
  VARIANT 180: note = Xaa can be any naturally occurring amino acid
  VARIANT 181: note = Xaa can be any naturally occurring amino acid
  VARIANT 182: note = Xaa can be any naturally occurring amino acid
  VARIANT 184: note = Xaa can be any naturally occurring amino acid except Pro or Gly
  VARIANT 185: note = Xaa can be any naturally occurring amino acid except Pro or Gly
  VARIANT 186: note = Xaa can be any naturally occurring amino acid except Pro or Gly
  VARIANT 187: note = Xaa can be any naturally occurring amino acid except Pro or Gly
  VARIANT 189: note = Xaa can be any naturally occurring amino acid
  VARIANT 190: note = Xaa can be any naturally occurring amino acid
  VARIANT 191: note = Xaa can be any naturally occurring amino acid
  VARIANT 193: note = Xaa can be any naturally occurring amino acid except Pro or Gly
  VARIANT 194: note = Xaa can be any naturally occurring amino acid except Pro or Gly
  VARIANT 195: note = Xaa can be any naturally occurring amino acid except Pro or Gly
  VARIANT 196: note = Xaa can be any naturally occurring amino acid except Pro or Gly
  VARIANT 198: note = Xaa can be any naturally occurring amino acid
  VARIANT 199: note = Xaa can be any naturally occurring amino acid
  VARIANT 200: note = Xaa can be any naturally occurring amino acid
  VARIANT 202: note = Xaa can be any naturally occurring amino acid except Pro or Gly
  VARIANT 203: note = Xaa can be any naturally occurring amino acid except Pro or Gly
  VARIANT 204: note = Xaa can be any naturally occurring amino acid except Pro or Gly
  VARIANT 205: note = Xaa can be any naturally occurring amino acid except Pro or Gly
  VARIANT 207: note = Xaa can be any naturally occurring amino acid
  VARIANT 208: note = Xaa can be any naturally occurring amino acid
  VARIANT 209: note = Xaa can be any naturally occurring amino acid
  VARIANT 211: note = Xaa can be any naturally occurring amino acid except Pro or Gly
  VARIANT 212: note = Xaa can be any naturally occurring amino acid except Pro or Gly
  VARIANT 213: note = Xaa can be any naturally occurring amino acid except Pro or Gly
  VARIANT 214: note = Xaa can be any naturally occurring amino acid except Pro or Gly
  VARIANT 216: note = Xaa can be any naturally occurring amino acid
  VARIANT 217: note = Xaa can be any naturally occurring amino acid
  VARIANT 218: note = Xaa can be any naturally occurring amino acid
  VARIANT 220: note = Xaa can be any naturally occurring amino acid except Pro or Gly
  VARIANT 221: note = Xaa can be any naturally occurring amino acid except Pro or Gly
  VARIANT 222: note = Xaa can be any naturally occurring amino acid except Pro or Gly
  VARIANT 223: note = Xaa can be any naturally occurring amino acid except Pro or Gly
  VARIANT 225: note = Xaa can be any naturally occurring amino acid
  VARIANT 226: note = Xaa can be any naturally occurring amino acid
  VARIANT 227: note = Xaa can be any naturally occurring amino acid
  VARIANT 229: note = Xaa can be any naturally occurring amino acid except Pro or Gly
  VARIANT 230: note = Xaa can be any naturally occurring amino acid except Pro or Gly
  VARIANT 231: note = Xaa can be any naturally occurring amino acid except Pro or Gly
  VARIANT 232: note = Xaa can be any naturally occurring amino acid except Pro or Gly
  VARIANT 234: note = Xaa can be any naturally occurring amino acid
  VARIANT 235: note = Xaa can be any naturally occurring amino acid
  VARIANT 236: note = Xaa can be any naturally occurring amino acid
  VARIANT 238: note = Xaa can be any naturally occurring amino acid except Pro or Gly
  VARIANT 239: note = Xaa can be any naturally occurring amino acid except Pro or Gly
  VARIANT 240: note = Xaa can be any naturally occurring amino acid except Pro or Gly
  VARIANT 241: note = Xaa can be any naturally occurring amino acid except Pro or Gly
  VARIANT 243: note = Xaa can be any naturally occurring amino acid
  VARIANT 244: note = Xaa can be any naturally occurring amino acid
  VARIANT 245: note = Xaa can be any naturally occurring amino acid
  VARIANT 247: note = Xaa can be any naturally occurring amino acid except Pro or Gly
  VARIANT 248: note = Xaa can be any naturally occurring amino acid except Pro or Gly
  VARIANT 249: note = Xaa can be any naturally occurring amino acid except Pro or Gly
  VARIANT 250: note = Xaa can be any naturally occurring amino acid except Pro or Gly
  VARIANT 252: note = Xaa can be any naturally occurring amino acid
  VARIANT 253: note = Xaa can be any naturally occurring amino acid
  VARIANT 254: note = Xaa can be any naturally occurring amino acid
  VARIANT 256: note = Xaa can be any naturally occurring amino acid except Pro or Gly
  VARIANT 257: note = Xaa can be any naturally occurring amino acid except Pro or Gly
  VARIANT 258: note = Xaa can be any naturally occurring amino acid except Pro or Gly
  VARIANT 259: note = Xaa can be any naturally occurring amino acid except Pro or Gly
  VARIANT 261: note = Xaa can be any naturally occurring amino acid
  VARIANT 262: note = Xaa can be any naturally occurring amino acid
  VARIANT 263: note = Xaa can be any naturally occurring amino acid
  VARIANT 265: note = Xaa can be any naturally occurring amino acid except Pro or Gly
  VARIANT 266: note = Xaa can be any naturally occurring amino acid except Pro or Gly
  VARIANT 267: note = Xaa can be any naturally occurring amino acid except Pro or Gly
  VARIANT 268: note = Xaa can be any naturally occurring amino acid except Pro or Gly
  VARIANT 270: note = Xaa can be any naturally occurring amino acid
  VARIANT 271: note = Xaa can be any naturally occurring amino acid
  VARIANT 272: note = Xaa can be any naturally occurring amino acid
  VARIANT 274: note = Xaa can be any naturally occurring amino acid except Pro or Gly
  VARIANT 275: note = Xaa can be any naturally occurring amino acid except Pro or Gly
  VARIANT 276: note = Xaa can be any naturally occurring amino acid except Pro or Gly
  VARIANT 277: note = Xaa can be any naturally occurring amino acid except Pro or Gly
  VARIANT 279: note = Xaa can be any naturally occurring amino acid
  VARIANT 280: note = Xaa can be any naturally occurring amino acid
  VARIANT 281: note = Xaa can be any naturally occurring amino acid
  VARIANT 283: note = Xaa can be any naturally occurring amino acid except Pro or Gly
  VARIANT 284: note = Xaa can be any naturally occurring amino acid except Pro or Gly
  VARIANT 285: note = Xaa can be any naturally occurring amino acid except Pro or Gly
  VARIANT 286: note = Xaa can be any naturally occurring amino acid except Pro or Gly
  VARIANT 288: note = Xaa can be any naturally occurring amino acid
  VARIANT 289: note = Xaa can be any naturally occurring amino acid
  VARIANT 290: note = Xaa can be any naturally occurring amino acid
  VARIANT 292: note = Xaa can be any naturally occurring amino acid except Pro or Gly
  VARIANT 293: note = Xaa can be any naturally occurring amino acid except Pro or Gly
  VARIANT 294: note = Xaa can be any naturally occurring amino acid except Pro or Gly
  VARIANT 295: note = Xaa can be any naturally occurring amino acid except Pro or Gly
  VARIANT 297: note = Xaa can be any naturally occurring amino acid
  VARIANT 298: note = Xaa can be any naturally occurring amino acid
  VARIANT 299: note = Xaa can be any naturally occurring amino acid
  VARIANT 301: note = Xaa can be any naturally occurring amino acid except Pro or Gly
  VARIANT 302: note = Xaa can be any naturally occurring amino acid except Pro or Gly
  VARIANT 303: note = Xaa can be any naturally occurring amino acid except Pro or Gly
  VARIANT 304: note = Xaa can be any naturally occurring amino acid except Pro or Gly
  VARIANT 306: note = Xaa can be any naturally occurring amino acid
  VARIANT 307: note = Xaa can be any naturally occurring amino acid
  VARIANT 308: note = Xaa can be any naturally occurring amino acid
  VARIANT 310: note = Xaa can be any naturally occurring amino acid except Pro or Gly
  VARIANT 311: note = Xaa can be any naturally occurring amino acid except Pro or Gly
  VARIANT 312: note = Xaa can be any naturally occurring amino acid except Pro or Gly
  VARIANT 313: note = Xaa can be any naturally occurring amino acid except Pro or Gly
  VARIANT 315: note = Xaa can be any naturally occurring amino acid
  VARIANT 316: note = Xaa can be any naturally occurring amino acid
  VARIANT 317: note = Xaa can be any naturally occurring amino acid
  VARIANT 319: note = Xaa can be any naturally occurring amino acid except Pro or Gly
  VARIANT 320: note = Xaa can be any naturally occurring amino acid except Pro or Gly
  VARIANT 321: note = Xaa can be any naturally occurring amino acid except Pro or Gly
  VARIANT 322: note = Xaa can be any naturally occurring amino acid except Pro or Gly
  VARIANT 324: note = Xaa can be any naturally occurring amino acid
  VARIANT 325: note = Xaa can be any naturally occurring amino acid
  VARIANT 326: note = Xaa can be any naturally occurring amino acid
  VARIANT 328: note = Xaa can be any naturally occurring amino acid except Pro or Gly
  VARIANT 329: note = Xaa can be any naturally occurring amino acid except Pro or Gly
  VARIANT 330: note = Xaa can be any naturally occurring amino acid except Pro or Gly
  VARIANT 331: note = Xaa can be any naturally occurring amino acid except Pro or Gly
  VARIANT 333: note = Xaa can be any naturally occurring amino acid
  VARIANT 334: note = Xaa can be any naturally occurring amino acid
  VARIANT 335: note = Xaa can be any naturally occurring amino acid
  VARIANT 337: note = Xaa can be any naturally occurring amino acid except Pro or Gly
  VARIANT 338: note = Xaa can be any naturally occurring amino acid except Pro or Gly
  VARIANT 339: note = Xaa can be any naturally occurring amino acid except Pro or Gly
  VARIANT 340: note = Xaa can be any naturally occurring amino acid except Pro or Gly
  VARIANT 342: note = Xaa can be any naturally occurring amino acid
  VARIANT 343: note = Xaa can be any naturally occurring amino acid
  VARIANT 344: note = Xaa can be any naturally occurring amino acid
  VARIANT 346: note = Xaa can be any naturally occurring amino acid except Pro or Gly
  VARIANT 347: note = Xaa can be any naturally occurring amino acid except Pro or Gly
  VARIANT 348: note = Xaa can be any naturally occurring amino acid except Pro or Gly
  VARIANT 349: note = Xaa can be any naturally occurring amino acid except Pro or Gly
  VARIANT 351: note = Xaa can be any naturally occurring amino acid
  VARIANT 352: note = Xaa can be any naturally occurring amino acid
  VARIANT 353: note = Xaa can be any naturally occurring amino acid
  VARIANT 355: note = Xaa can be any naturally occurring amino acid except Pro or Gly
  VARIANT 356: note = Xaa can be any naturally occurring amino acid except Pro or Gly
  VARIANT 357: note = Xaa can be any naturally occurring amino acid except Pro or Gly
  VARIANT 358: note = Xaa can be any naturally occurring amino acid except Pro or Gly
  VARIANT 360: note = Xaa can be any naturally occurring amino acid
  VARIANT 361: note = Xaa can be any naturally occurring amino acid
  VARIANT 362: note = Xaa can be any naturally occurring amino acid
  VARIANT 364: note = Xaa can be any naturally occurring amino acid except Pro or Gly
  VARIANT 365: note = Xaa can be any naturally occurring amino acid except Pro or Gly
  VARIANT 366: note = Xaa can be any naturally occurring amino acid except Pro or Gly
  VARIANT 367: note = Xaa can be any naturally occurring amino acid except Pro or Gly
  VARIANT 369: note = Xaa can be any naturally occurring amino acid
  VARIANT 370: note = Xaa can be any naturally occurring amino acid
  VARIANT 371: note = Xaa can be any naturally occurring amino acid
  VARIANT 373: note = Xaa can be any naturally occurring amino acid except Pro or Gly
  VARIANT 374: note = Xaa can be any naturally occurring amino acid except Pro or Gly
  VARIANT 375: note = Xaa can be any naturally occurring amino acid except Pro or Gly
  VARIANT 376: note = Xaa can be any naturally occurring amino acid except Pro or Gly
  VARIANT 378: note = Xaa can be any naturally occurring amino acid
  VARIANT 379: note = Xaa can be any naturally occurring amino acid
  VARIANT 380: note = Xaa can be any naturally occurring amino acid
  VARIANT 382: note = Xaa can be any naturally occurring amino acid except Pro or Gly
  VARIANT 383: note = Xaa can be any naturally occurring amino acid except Pro or Gly
  VARIANT 384: note = Xaa can be any naturally occurring amino acid except Pro or Gly
  VARIANT 385: note = Xaa can be any naturally occurring amino acid except Pro or Gly
  VARIANT 387: note = Xaa can be any naturally occurring amino acid
  VARIANT 388: note = Xaa can be any naturally occurring amino acid
  VARIANT 389: note = Xaa can be any naturally occurring amino acid
  VARIANT 391: note = Xaa can be any naturally occurring amino acid except Pro or Gly
  VARIANT 392: note = Xaa can be any naturally occurring amino acid except Pro or Gly
  VARIANT 393: note = Xaa can be any naturally occurring amino acid except Pro or Gly
  VARIANT 394: note = Xaa can be any naturally occurring amino acid except Pro or Gly
  VARIANT 396: note = Xaa can be any naturally occurring amino acid
  VARIANT 397: note = Xaa can be any naturally occurring amino acid
  VARIANT 398: note = Xaa can be any naturally occurring amino acid
  VARIANT 400: note = Xaa can be any naturally occurring amino acid except Pro or Gly
  VARIANT 401: note = Xaa can be any naturally occurring amino acid except Pro or Gly
  VARIANT 402: note = Xaa can be any naturally occurring amino acid except Pro or Gly
  VARIANT 403: note = Xaa can be any naturally occurring amino acid except Pro or Gly
  VARIANT 405: note = Xaa can be any naturally occurring amino acid
  VARIANT 406: note = Xaa can be any naturally occurring amino acid
  VARIANT 407: note = Xaa can be any naturally occurring amino acid
  VARIANT 409: note = Xaa can be any naturally occurring amino acid except Pro or Gly
  VARIANT 410: note = Xaa can be any naturally occurring amino acid except Pro or Gly
  VARIANT 411: note = Xaa can be any naturally occurring amino acid except Pro or Gly
  VARIANT 412: note = Xaa can be any naturally occurring amino acid except Pro or Gly
  VARIANT 414: note = Xaa can be any naturally occurring amino acid
  VARIANT 415: note = Xaa can be any naturally occurring amino acid
  VARIANT 416: note = Xaa can be any naturally occurring amino acid
  VARIANT 418: note = Xaa can be any naturally occurring amino acid except Pro or Gly
  VARIANT 419: note = Xaa can be any naturally occurring amino acid except Pro or Gly
  VARIANT 420: note = Xaa can be any naturally occurring amino acid except Pro or Gly
  VARIANT 421: note = Xaa can be any naturally occurring amino acid except Pro or Gly
  VARIANT 423: note = Xaa can be any naturally occurring amino acid
  VARIANT 424: note = Xaa can be any naturally occurring amino acid
  VARIANT 425: note = Xaa can be any naturally occurring amino acid
  VARIANT 427: note = Xaa can be any naturally occurring amino acid except Pro or Gly
  VARIANT 428: note = Xaa can be any naturally occurring amino acid except Pro or Gly
  VARIANT 429: note = Xaa can be any naturally occurring amino acid except Pro or Gly
  VARIANT 430: note = Xaa can be any naturally occurring amino acid except Pro or Gly
  VARIANT 432: note = Xaa can be any naturally occurring amino acid
  VARIANT 433: note = Xaa can be any naturally occurring amino acid
  VARIANT 434: note = Xaa can be any naturally occurring amino acid
  VARIANT 436: note = Xaa can be any naturally occurring amino acid except Pro or Gly
  VARIANT 437: note = Xaa can be any naturally occurring amino acid except Pro or Gly
  VARIANT 438: note = Xaa can be any naturally occurring amino acid except Pro or Gly
  VARIANT 439: note = Xaa can be any naturally occurring amino acid except Pro or Gly
  VARIANT 441: note = Xaa can be any naturally occurring amino acid
  VARIANT 442: note = Xaa can be any naturally occurring amino acid
  VARIANT 443: note = Xaa can be any naturally occurring amino acid
  VARIANT 445: note = Xaa can be any naturally occurring amino acid except Pro or Gly
  VARIANT 446: note = Xaa can be any naturally occurring amino acid except Pro or Gly
  VARIANT 447: note = Xaa can be any naturally occurring amino acid except Pro or Gly
  VARIANT 448: note = Xaa can be any naturally occurring amino acid except Pro or Gly
  VARIANT 450: note = Xaa can be any naturally occurring amino acid
  VARIANT 451: note = Xaa can be any naturally occurring amino acid
  VARIANT 452: note = Xaa can be any naturally occurring amino acid
  VARIANT 454: note = Xaa can be any naturally occurring amino acid except Pro or Gly
  VARIANT 455: note = Xaa can be any naturally occurring amino acid except Pro or Gly
  VARIANT 456: note = Xaa can be any naturally occurring amino acid except Pro or Gly
  VARIANT 457: note = Xaa can be any naturally occurring amino acid except Pro or Gly
  VARIANT 459: note = Xaa can be any naturally occurring amino acid
  VARIANT 460: note = Xaa can be any naturally occurring amino acid
  VARIANT 461: note = Xaa can be any naturally occurring amino acid
  VARIANT 463: note = Xaa can be any naturally occurring amino acid except Pro or Gly
  VARIANT 464: note = Xaa can be any naturally occurring amino acid except Pro or Gly
  VARIANT 465: note = Xaa can be any naturally occurring amino acid except Pro or Gly
  VARIANT 466: note = Xaa can be any naturally occurring amino acid except Pro or Gly
  VARIANT 468: note = Xaa can be any naturally occurring amino acid
  VARIANT 469: note = Xaa can be any naturally occurring amino acid
  VARIANT 470: note = Xaa can be any naturally occurring amino acid
  VARIANT 472: note = Xaa can be any naturally occurring amino acid except Pro or Gly
  VARIANT 473: note = Xaa can be any naturally occurring amino acid except Pro or Gly
  VARIANT 474: note = Xaa can be any naturally occurring amino acid except Pro or Gly
  VARIANT 475: note = Xaa can be any naturally occurring amino acid except Pro or Gly
  VARIANT 477: note = Xaa can be any naturally occurring amino acid
  VARIANT 478: note = Xaa can be any naturally occurring amino acid
  VARIANT 479: note = Xaa can be any naturally occurring amino acid
  VARIANT 481: note = Xaa can be any naturally occurring amino acid except Pro or Gly
  VARIANT 482: note = Xaa can be any naturally occurring amino acid except Pro or Gly
  VARIANT 483: note = Xaa can be any naturally occurring amino acid except Pro or Gly
  VARIANT 484: note = Xaa can be any naturally occurring amino acid except Pro or Gly
  VARIANT 486: note = Xaa can be any naturally occurring amino acid
  VARIANT 487: note = Xaa can be any naturally occurring amino acid
  VARIANT 488: note = Xaa can be any naturally occurring amino acid
  VARIANT 490: note = Xaa can be any naturally occurring amino acid except Pro or Gly
  VARIANT 491: note = Xaa can be any naturally occurring amino acid except Pro or Gly
  VARIANT 492: note = Xaa can be any naturally occurring amino acid except Pro or Gly
  VARIANT 493: note = Xaa can be any naturally occurring amino acid except Pro or Gly
  VARIANT 495: note = Xaa can be any naturally occurring amino acid
  VARIANT 496: note = Xaa can be any naturally occurring amino acid
  VARIANT 497: note = Xaa can be any naturally occurring amino acid
  VARIANT 499: note = Xaa can be any naturally occurring amino acid except Pro or Gly
  VARIANT 500: note = Xaa can be any naturally occurring amino acid except Pro or Gly
  VARIANT 501: note = Xaa can be any naturally occurring amino acid except Pro or Gly
  VARIANT 502: note = Xaa can be any naturally occurring amino acid except Pro or Gly
  VARIANT 504: note = Xaa can be any naturally occurring amino acid
  VARIANT 505: note = Xaa can be any naturally occurring amino acid
  VARIANT 506: note = Xaa can be any naturally occurring amino acid
  VARIANT 508: note = Xaa can be any naturally occurring amino acid except Pro or Gly
  VARIANT 509: note = Xaa can be any naturally occurring amino acid except Pro or Gly
  VARIANT 510: note = Xaa can be any naturally occurring amino acid except Pro or Gly
  VARIANT 511: note = Xaa can be any naturally occurring amino acid except Pro or Gly
  VARIANT 513: note = Xaa can be any naturally occurring amino acid
  VARIANT 514: note = Xaa can be any naturally occurring amino acid
  VARIANT 515: note = Xaa can be any naturally occurring amino acid
  VARIANT 517: note = Xaa can be any naturally occurring amino acid except Pro or Gly
  VARIANT 518: note = Xaa can be any naturally occurring amino acid except Pro or Gly
  VARIANT 519: note = Xaa can be any naturally occurring amino acid except Pro or Gly
  VARIANT 520: note = Xaa can be any naturally occurring amino acid except Pro or Gly
  VARIANT 522: note = Xaa can be any naturally occurring amino acid
  VARIANT 523: note = Xaa can be any naturally occurring amino acid
  VARIANT 524: note = Xaa can be any naturally occurring amino acid
  VARIANT 526: note = Xaa can be any naturally occurring amino acid except Pro or Gly
  VARIANT 527: note = Xaa can be any naturally occurring amino acid except Pro or Gly
  VARIANT 528: note = Xaa can be any naturally occurring amino acid except Pro or Gly
  VARIANT 529: note = Xaa can be any naturally occurring amino acid except Pro or Gly
  VARIANT 531: note = Xaa can be any naturally occurring amino acid
  VARIANT 532: note = Xaa can be any naturally occurring amino acid
  VARIANT 533: note = Xaa can be any naturally occurring amino acid
  VARIANT 535: note = Xaa can be any naturally occurring amino acid except Pro or Gly
  VARIANT 536: note = Xaa can be any naturally occurring amino acid except Pro or Gly
  VARIANT 537: note = Xaa can be any naturally occurring amino acid except Pro or Gly
  VARIANT 538: note = Xaa can be any naturally occurring amino acid except Pro or Gly
  VARIANT 540: note = Xaa can be any naturally occurring amino acid
  VARIANT 541: note = Xaa can be any naturally occurring amino acid
  VARIANT 542: note = Xaa can be any naturally occurring amino acid
  VARIANT 544: note = Xaa can be any naturally occurring amino acid except Pro or Gly
  VARIANT 545: note = Xaa can be any naturally occurring amino acid except Pro or Gly
  VARIANT 546: note = Xaa can be any naturally occurring amino acid except Pro or Gly
  VARIANT 547: note = Xaa can be any naturally occurring amino acid except Pro or Gly
  VARIANT 549: note = Xaa can be any naturally occurring amino acid
  VARIANT 550: note = Xaa can be any naturally occurring amino acid
  VARIANT 551: note = Xaa can be any naturally occurring amino acid
  VARIANT 553: note = Xaa can be any naturally occurring amino acid except Pro or Gly
  VARIANT 554: note = Xaa can be any naturally occurring amino acid except Pro or Gly
  VARIANT 555: note = Xaa can be any naturally occurring amino acid except Pro or Gly
  VARIANT 556: note = Xaa can be any naturally occurring amino acid except Pro or Gly
  VARIANT 558: note = Xaa can be any naturally occurring amino acid
  VARIANT 559: note = Xaa can be any naturally occurring amino acid
  VARIANT 560: note = Xaa can be any naturally occurring amino acid
  VARIANT 562: note = Xaa can be any naturally occurring amino acid except Pro or Gly
  VARIANT 563: note = Xaa can be any naturally occurring amino acid except Pro or Gly
  VARIANT 564: note = Xaa can be any naturally occurring amino acid except Pro or Gly
  VARIANT 565: note = Xaa can be any naturally occurring amino acid except Pro or Gly
  VARIANT 567: note = Xaa can be any naturally occurring amino acid
  VARIANT 568: note = Xaa can be any naturally occurring amino acid
  VARIANT 569: note = Xaa can be any naturally occurring amino acid
  VARIANT 571: note = Xaa can be any naturally occurring amino acid except Pro or Gly
  VARIANT 572: note = Xaa can be any naturally occurring amino acid except Pro or Gly
  VARIANT 573: note = Xaa can be any naturally occurring amino acid except Pro or Gly
  VARIANT 574: note = Xaa can be any naturally occurring amino acid except Pro or Gly
  VARIANT 576: note = Xaa can be any naturally occurring amino acid
  VARIANT 577: note = Xaa can be any naturally occurring amino acid
  VARIANT 578: note = Xaa can be any naturally occurring amino acid
  VARIANT 580: note = Xaa can be any naturally occurring amino acid except Pro or Gly
  VARIANT 581: note = Xaa can be any naturally occurring amino acid except Pro or Gly
  VARIANT 582: note = Xaa can be any naturally occurring amino acid except Pro or Gly
  VARIANT 583: note = Xaa can be any naturally occurring amino acid except Pro or Gly
  VARIANT 585: note = Xaa can be any naturally occurring amino acid
  VARIANT 586: note = Xaa can be any naturally occurring amino acid
  VARIANT 587: note = Xaa can be any naturally occurring amino acid
  VARIANT 589: note = Xaa can be any naturally occurring amino acid except Pro or Gly
  VARIANT 590: note = Xaa can be any naturally occurring amino acid except Pro or Gly
  VARIANT 591: note = Xaa can be any naturally occurring amino acid except Pro or Gly
  VARIANT 592: note = Xaa can be any naturally occurring amino acid except Pro or Gly
  VARIANT 594: note = Xaa can be any naturally occurring amino acid
  VARIANT 595: note = Xaa can be any naturally occurring amino acid
  VARIANT 596: note = Xaa can be any naturally occurring amino acid
  VARIANT 598: note = Xaa can be any naturally occurring amino acid except Pro or Gly
  VARIANT 599: note = Xaa can be any naturally occurring amino acid except Pro or Gly
  VARIANT 600: note = Xaa can be any naturally occurring amino acid except Pro or Gly
  VARIANT 601: note = Xaa can be any naturally occurring amino acid except Pro or Gly
  VARIANT 603: note = Xaa can be any naturally occurring amino acid
  VARIANT 604: note = Xaa can be any naturally occurring amino acid
  VARIANT 605: note = Xaa can be any naturally occurring amino acid
  VARIANT 607: note = Xaa can be any naturally occurring amino acid except Pro or Gly
  VARIANT 608: note = Xaa can be any naturally occurring amino acid except Pro or Gly
  VARIANT 609: note = Xaa can be any naturally occurring amino acid except Pro or Gly
  VARIANT 610: note = Xaa can be any naturally occurring amino acid except Pro or Gly
  VARIANT 612: note = Xaa can be any naturally occurring amino acid
  VARIANT 613: note = Xaa can be any naturally occurring amino acid
  VARIANT 614: note = Xaa can be any naturally occurring amino acid
  VARIANT 616: note = Xaa can be any naturally occurring amino acid except Pro or Gly
  VARIANT 617: note = Xaa can be any naturally occurring amino acid except Pro or Gly
  VARIANT 618: note = Xaa can be any naturally occurring amino acid except Pro or Gly
  VARIANT 619: note = Xaa can be any naturally occurring amino acid except Pro or Gly
  VARIANT 621: note = Xaa can be any naturally occurring amino acid
  VARIANT 622: note = Xaa can be any naturally occurring amino acid
  VARIANT 623: note = Xaa can be any naturally occurring amino acid
  VARIANT 625: note = Xaa can be any naturally occurring amino acid except Pro or Gly
  VARIANT 626: note = Xaa can be any naturally occurring amino acid except Pro or Gly
  VARIANT 627: note = Xaa can be any naturally occurring amino acid except Pro or Gly
  VARIANT 628: note = Xaa can be any naturally occurring amino acid except Pro or Gly
  VARIANT 630: note = Xaa can be any naturally occurring amino acid
  VARIANT 631: note = Xaa can be any naturally occurring amino acid
  VARIANT 632: note = Xaa can be any naturally occurring amino acid
  VARIANT 634: note = Xaa can be any naturally occurring amino acid except Pro or Gly
  VARIANT 635: note = Xaa can be any naturally occurring amino acid except Pro or Gly
  VARIANT 636: note = Xaa can be any naturally occurring amino acid except Pro or Gly
  VARIANT 637: note = Xaa can be any naturally occurring amino acid except Pro or Gly
  VARIANT 639: note = Xaa can be any naturally occurring amino acid
  VARIANT 640: note = Xaa can be any naturally occurring amino acid
  VARIANT 641: note = Xaa can be any naturally occurring amino acid
  VARIANT 643: note = Xaa can be any naturally occurring amino acid except Pro or Gly
  VARIANT 644: note = Xaa can be any naturally occurring amino acid except Pro or Gly
  VARIANT 645: note = Xaa can be any naturally occurring amino acid except Pro or Gly
  VARIANT 646: note = Xaa can be any naturally occurring amino acid except Pro or Gly
  VARIANT 648: note = Xaa can be any naturally occurring amino acid
  VARIANT 649: note = Xaa can be any naturally occurring amino acid
  VARIANT 650: note = Xaa can be any naturally occurring amino acid
  VARIANT 652: note = Xaa can be any naturally occurring amino acid except Pro or Gly
  VARIANT 653: note = Xaa can be any naturally occurring amino acid except Pro or Gly
  VARIANT 654: note = Xaa can be any naturally occurring amino acid except Pro or Gly
  VARIANT 655: note = Xaa can be any naturally occurring amino acid except Pro or Gly
  VARIANT 657: note = Xaa can be any naturally occurring amino acid
  VARIANT 658: note = Xaa can be any naturally occurring amino acid
  VARIANT 659: note = Xaa can be any naturally occurring amino acid
  VARIANT 661: note = Xaa can be any naturally occurring amino acid except Pro or Gly
  VARIANT 662: note = Xaa can be any naturally occurring amino acid except Pro or Gly
  VARIANT 663: note = Xaa can be any naturally occurring amino acid except Pro or Gly
  VARIANT 664: note = Xaa can be any naturally occurring amino acid except Pro or Gly
  VARIANT 666: note = Xaa can be any naturally occurring amino acid
  VARIANT 667: note = Xaa can be any naturally occurring amino acid
  VARIANT 668: note = Xaa can be any naturally occurring amino acid
  VARIANT 670: note = Xaa can be any naturally occurring amino acid except Pro or Gly
  VARIANT 671: note = Xaa can be any naturally occurring amino acid except Pro or Gly
  VARIANT 672: note = Xaa can be any naturally occurring amino acid except Pro or Gly
  VARIANT 673: note = Xaa can be any naturally occurring amino acid except Pro or Gly
  VARIANT 675: note = Xaa can be any naturally occurring amino acid
  VARIANT 676: note = Xaa can be any naturally occurring amino acid
  VARIANT 677: note = Xaa can be any naturally occurring amino acid
  VARIANT 679: note = Xaa can be any naturally occurring amino acid except Pro or Gly
  VARIANT 680: note = Xaa can be any naturally occurring amino acid except Pro or Gly
  VARIANT 681: note = Xaa can be any naturally occurring amino acid except Pro or Gly
  VARIANT 682: note = Xaa can be any naturally occurring amino acid except Pro or Gly
  VARIANT 684: note = Xaa can be any naturally occurring amino acid
  VARIANT 685: note = Xaa can be any naturally occurring amino acid
  VARIANT 686: note = Xaa can be any naturally occurring amino acid
  VARIANT 688: note = Xaa can be any naturally occurring amino acid except Pro or Gly
  VARIANT 689: note = Xaa can be any naturally occurring amino acid except Pro or Gly
  VARIANT 690: note = Xaa can be any naturally occurring amino acid except Pro or Gly
  VARIANT 691: note = Xaa can be any naturally occurring amino acid except Pro or Gly
  VARIANT 693: note = Xaa can be any naturally occurring amino acid
  VARIANT 694: note = Xaa can be any naturally occurring amino acid
  VARIANT 695: note = Xaa can be any naturally occurring amino acid
  VARIANT 697: note = Xaa can be any naturally occurring amino acid except Pro or Gly
  VARIANT 698: note = Xaa can be any naturally occurring amino acid except Pro or Gly
  VARIANT 699: note = Xaa can be any naturally occurring amino acid except Pro or Gly
  VARIANT 700: note = Xaa can be any naturally occurring amino acid except Pro or Gly
  VARIANT 702: note = Xaa can be any naturally occurring amino acid
  VARIANT 703: note = Xaa can be any naturally occurring amino acid
  VARIANT 704: note = Xaa can be any naturally occurring amino acid
  VARIANT 706: note = Xaa can be any naturally occurring amino acid except Pro or Gly
  VARIANT 707: note = Xaa can be any naturally occurring amino acid except Pro or Gly
  VARIANT 708: note = Xaa can be any naturally occurring amino acid except Pro or Gly
  VARIANT 709: note = Xaa can be any naturally occurring amino acid except Pro or Gly
  VARIANT 711: note = Xaa can be any naturally occurring amino acid
  VARIANT 712: note = Xaa can be any naturally occurring amino acid
  VARIANT 713: note = Xaa can be any naturally occurring amino acid
  VARIANT 715: note = Xaa can be any naturally occurring amino acid except Pro or Gly
  VARIANT 716: note = Xaa can be any naturally occurring amino acid except Pro or Gly
  VARIANT 717: note = Xaa can be any naturally occurring amino acid except Pro or Gly
  VARIANT 718: note = Xaa can be any naturally occurring amino acid except Pro or Gly
  VARIANT 720: note = Xaa can be any naturally occurring amino acid
  VARIANT 721: note = Xaa can be any naturally occurring amino acid
  VARIANT 722: note = Xaa can be any naturally occurring amino acid
  VARIANT 724: note = Xaa can be any naturally occurring amino acid except Pro or Gly
  VARIANT 725: note = Xaa can be any naturally occurring amino acid except Pro or Gly
  VARIANT 726: note = Xaa can be any naturally occurring amino acid except Pro or Gly
  VARIANT 727: note = Xaa can be any naturally occurring amino acid except Pro or Gly
  VARIANT 729: note = Xaa can be any naturally occurring amino acid
  VARIANT 730: note = Xaa can be any naturally occurring amino acid
  VARIANT 731: note = Xaa can be any naturally occurring amino acid
  VARIANT 733: note = Xaa can be any naturally occurring amino acid except Pro or Gly
  VARIANT 734: note = Xaa can be any naturally occurring amino acid except Pro or Gly
  VARIANT 735: note = Xaa can be any naturally occurring amino acid except Pro or Gly
  VARIANT 736: note = Xaa can be any naturally occurring amino acid except Pro or Gly
  VARIANT 738: note = Xaa can be any naturally occurring amino acid
  VARIANT 739: note = Xaa can be any naturally occurring amino acid
  VARIANT 740: note = Xaa can be any naturally occurring amino acid
  VARIANT 742: note = Xaa can be any naturally occurring amino acid except Pro or Gly
  VARIANT 743: note = Xaa can be any naturally occurring amino acid except Pro or Gly
  VARIANT 744: note = Xaa can be any naturally occurring amino acid except Pro or Gly
  VARIANT 745: note = Xaa can be any naturally occurring amino acid except Pro or Gly
  VARIANT 747: note = Xaa can be any naturally occurring amino acid
  VARIANT 748: note = Xaa can be any naturally occurring amino acid
  VARIANT 749: note = Xaa can be any naturally occurring amino acid
  VARIANT 751: note = Xaa can be any naturally occurring amino acid except Pro or Gly
  VARIANT 752: note = Xaa can be any naturally occurring amino acid except Pro or Gly
  VARIANT 753: note = Xaa can be any naturally occurring amino acid except Pro or Gly
  VARIANT 754: note = Xaa can be any naturally occurring amino acid except Pro or Gly
  VARIANT 756: note = Xaa can be any naturally occurring amino acid
  VARIANT 757: note = Xaa can be any naturally occurring amino acid
  VARIANT 758: note = Xaa can be any naturally occurring amino acid
  VARIANT 760: note = Xaa can be any naturally occurring amino acid except Pro or Gly
  VARIANT 761: note = Xaa can be any naturally occurring amino acid except Pro or Gly
  VARIANT 762: note = Xaa can be any naturally occurring amino acid except Pro or Gly
  VARIANT 763: note = Xaa can be any naturally occurring amino acid except Pro or Gly
  VARIANT 765: note = Xaa can be any naturally occurring amino acid
  VARIANT 766: note = Xaa can be any naturally occurring amino acid
  VARIANT 767: note = Xaa can be any naturally occurring amino acid
  VARIANT 769: note = Xaa can be any naturally occurring amino acid except Pro or Gly
  VARIANT 770: note = Xaa can be any naturally occurring amino acid except Pro or Gly
  VARIANT 771: note = Xaa can be any naturally occurring amino acid except Pro or Gly
  VARIANT 772: note = Xaa can be any naturally occurring amino acid except Pro or Gly
  VARIANT 774: note = Xaa can be any naturally occurring amino acid
  VARIANT 775: note = Xaa can be any naturally occurring amino acid
  VARIANT 776: note = Xaa can be any naturally occurring amino acid
  VARIANT 778: note = Xaa can be any naturally occurring amino acid except Pro or Gly
  VARIANT 779: note = Xaa can be any naturally occurring amino acid except Pro or Gly
  VARIANT 780: note = Xaa can be any naturally occurring amino acid except Pro or Gly
  VARIANT 781: note = Xaa can be any naturally occurring amino acid except Pro or Gly
  VARIANT 783: note = Xaa can be any naturally occurring amino acid
  VARIANT 784: note = Xaa can be any naturally occurring amino acid
  VARIANT 785: note = Xaa can be any naturally occurring amino acid
  VARIANT 787: note = Xaa can be any naturally occurring amino acid except Pro or Gly
  VARIANT 788: note = Xaa can be any naturally occurring amino acid except Pro or Gly
  VARIANT 789: note = Xaa can be any naturally occurring amino acid except Pro or Gly
  VARIANT 790: note = Xaa can be any naturally occurring amino acid except Pro or Gly
  VARIANT 792: note = Xaa can be any naturally occurring amino acid
  VARIANT 793: note = Xaa can be any naturally occurring amino acid
  VARIANT 794: note = Xaa can be any naturally occurring amino acid
  VARIANT 796: note = Xaa can be any naturally occurring amino acid except Pro or Gly
  VARIANT 797: note = Xaa can be any naturally occurring amino acid except Pro or Gly
  VARIANT 798: note = Xaa can be any naturally occurring amino acid except Pro or Gly
  VARIANT 799: note = Xaa can be any naturally occurring amino acid except Pro or Gly
  VARIANT 801: note = Xaa can be any naturally occurring amino acid
  VARIANT 802: note = Xaa can be any naturally occurring amino acid
  VARIANT 803: note = Xaa can be any naturally occurring amino acid
  VARIANT 805: note = Xaa can be any naturally occurring amino acid except Pro or Gly
  VARIANT 806: note = Xaa can be any naturally occurring amino acid except Pro or Gly
  VARIANT 807: note = Xaa can be any naturally occurring amino acid except Pro or Gly
  VARIANT 808: note = Xaa can be any naturally occurring amino acid except Pro or Gly
  VARIANT 810: note = Xaa can be any naturally occurring amino acid
  VARIANT 811: note = Xaa can be any naturally occurring amino acid
  VARIANT 812: note = Xaa can be any naturally occurring amino acid
  VARIANT 814: note = Xaa can be any naturally occurring amino acid except Pro or Gly
  VARIANT 815: note = Xaa can be any naturally occurring amino acid except Pro or Gly
  VARIANT 816: note = Xaa can be any naturally occurring amino acid except Pro or Gly
  VARIANT 817: note = Xaa can be any naturally occurring amino acid except Pro or Gly
  VARIANT 819: note = Xaa can be any naturally occurring amino acid
  VARIANT 820: note = Xaa can be any naturally occurring amino acid
  VARIANT 821: note = Xaa can be any naturally occurring amino acid
  VARIANT 823: note = Xaa can be any naturally occurring amino acid except Pro or Gly
  VARIANT 824: note = Xaa can be any naturally occurring amino acid except Pro or Gly
  VARIANT 825: note = Xaa can be any naturally occurring amino acid except Pro or Gly
  VARIANT 826: note = Xaa can be any naturally occurring amino acid except Pro or Gly
  VARIANT 828: note = Xaa can be any naturally occurring amino acid
  VARIANT 829: note = Xaa can be any naturally occurring amino acid
  VARIANT 830: note = Xaa can be any naturally occurring amino acid
  VARIANT 832: note = Xaa can be any naturally occurring amino acid except Pro or Gly
  VARIANT 833: note = Xaa can be any naturally occurring amino acid except Pro or Gly
  VARIANT 834: note = Xaa can be any naturally occurring amino acid except Pro or Gly
  VARIANT 835: note = Xaa can be any naturally occurring amino acid except Pro or Gly
  VARIANT 837: note = Xaa can be any naturally occurring amino acid
  VARIANT 838: note = Xaa can be any naturally occurring amino acid
  VARIANT 839: note = Xaa can be any naturally occurring amino acid
  VARIANT 841: note = Xaa can be any naturally occurring amino acid except Pro or Gly
  VARIANT 842: note = Xaa can be any naturally occurring amino acid except Pro or Gly
  VARIANT 843: note = Xaa can be any naturally occurring amino acid except Pro or Gly
  VARIANT 844: note = Xaa can be any naturally occurring amino acid except Pro or Gly
  VARIANT 846: note = Xaa can be any naturally occurring amino acid
  VARIANT 847: note = Xaa can be any naturally occurring amino acid
  VARIANT 848: note = Xaa can be any naturally occurring amino acid
  VARIANT 850: note = Xaa can be any naturally occurring amino acid except Pro or Gly
  VARIANT 851: note = Xaa can be any naturally occurring amino acid except Pro or Gly
  VARIANT 852: note = Xaa can be any naturally occurring amino acid except Pro or Gly
  VARIANT 853: note = Xaa can be any naturally occurring amino acid except Pro or Gly
  VARIANT 855: note = Xaa can be any naturally occurring amino acid
  VARIANT 856: note = Xaa can be any naturally occurring amino acid
  VARIANT 857: note = Xaa can be any naturally occurring amino acid
  VARIANT 859: note = Xaa can be any naturally occurring amino acid except Pro or Gly
  VARIANT 860: note = Xaa can be any naturally occurring amino acid except Pro or Gly
  VARIANT 861: note = Xaa can be any naturally occurring amino acid except Pro or Gly
  VARIANT 862: note = Xaa can be any naturally occurring amino acid except Pro or Gly
  VARIANT 864: note = Xaa can be any naturally occurring amino acid
  VARIANT 865: note = Xaa can be any naturally occurring amino acid
  VARIANT 866: note = Xaa can be any naturally occurring amino acid
  VARIANT 868: note = Xaa can be any naturally occurring amino acid except Pro or Gly
  VARIANT 869: note = Xaa can be any naturally occurring amino acid except Pro or Gly
  VARIANT 870: note = Xaa can be any naturally occurring amino acid except Pro or Gly
  VARIANT 871: note = Xaa can be any naturally occurring amino acid except Pro or Gly
  VARIANT 873: note = Xaa can be any naturally occurring amino acid
  VARIANT 874: note = Xaa can be any naturally occurring amino acid
  VARIANT 875: note = Xaa can be any naturally occurring amino acid
  VARIANT 877: note = Xaa can be any naturally occurring amino acid except Pro or Gly
  VARIANT 878: note = Xaa can be any naturally occurring amino acid except Pro or Gly
  VARIANT 879: note = Xaa can be any naturally occurring amino acid except Pro or Gly
  VARIANT 880: note = Xaa can be any naturally occurring amino acid except Pro or Gly
  VARIANT 882: note = Xaa can be any naturally occurring amino acid
  VARIANT 883: note = Xaa can be any naturally occurring amino acid
  VARIANT 884: note = Xaa can be any naturally occurring amino acid
  VARIANT 886: note = Xaa can be any naturally occurring amino acid except Pro or Gly
  VARIANT 887: note = Xaa can be any naturally occurring amino acid except Pro or Gly
  VARIANT 888: note = Xaa can be any naturally occurring amino acid except Pro or Gly
  VARIANT 889: note = Xaa can be any naturally occurring amino acid except Pro or Gly
  VARIANT 891: note = Xaa can be any naturally occurring amino acid
  VARIANT 892: note = Xaa can be any naturally occurring amino acid
  VARIANT 893: note = Xaa can be any naturally occurring amino acid
  VARIANT 895: note = Xaa can be any naturally occurring amino acid except Pro or Gly
  VARIANT 896: note = Xaa can be any naturally occurring amino acid except Pro or Gly
  VARIANT 897: note = Xaa can be any naturally occurring amino acid except Pro or Gly
  VARIANT 898: note = Xaa can be any naturally occurring amino acid except Pro or Gly
  VARIANT 900: note = Xaa can be any naturally occurring amino acid
  VARIANT 901: note = Xaa can be any naturally occurring amino acid
  VARIANT 902: note = Xaa can be any naturally occurring amino acid
  VARIANT 904: note = Xaa can be any naturally occurring amino acid except Pro or Gly
  VARIANT 905: note = Xaa can be any naturally occurring amino acid except Pro or Gly
  VARIANT 906: note = Xaa can be any naturally occurring amino acid except Pro or Gly
  VARIANT 907: note = Xaa can be any naturally occurring amino acid except Pro or Gly
  VARIANT 909: note = Xaa can be any naturally occurring amino acid
  VARIANT 910: note = Xaa can be any naturally occurring amino acid
  VARIANT 911: note = Xaa can be any naturally occurring amino acid
  VARIANT 913: note = Xaa can be any naturally occurring amino acid except Pro or Gly
  VARIANT 914: note = Xaa can be any naturally occurring amino acid except Pro or Gly
  VARIANT 915: note = Xaa can be any naturally occurring amino acid except Pro or Gly
  VARIANT 916: note = Xaa can be any naturally occurring amino acid except Pro or Gly
  VARIANT 918: note = Xaa can be any naturally occurring amino acid
  VARIANT 919: note = Xaa can be any naturally occurring amino acid
  VARIANT 920: note = Xaa can be any naturally occurring amino acid
  VARIANT 922: note = Xaa can be any naturally occurring amino acid except Pro or Gly
  VARIANT 923: note = Xaa can be any naturally occurring amino acid except Pro or Gly
  VARIANT 924: note = Xaa can be any naturally occurring amino acid except Pro or Gly
  VARIANT 925: note = Xaa can be any naturally occurring amino acid except Pro or Gly
  VARIANT 927: note = Xaa can be any naturally occurring amino acid
  VARIANT 928: note = Xaa can be any naturally occurring amino acid
  VARIANT 929: note = Xaa can be any naturally occurring amino acid
  VARIANT 931: note = Xaa can be any naturally occurring amino acid except Pro or Gly
  VARIANT 932: note = Xaa can be any naturally occurring amino acid except Pro or Gly
  VARIANT 933: note = Xaa can be any naturally occurring amino acid except Pro or Gly
  VARIANT 934: note = Xaa can be any naturally occurring amino acid except Pro or Gly
  VARIANT 936: note = Xaa can be any naturally occurring amino acid
  VARIANT 937: note = Xaa can be any naturally occurring amino acid
  VARIANT 938: note = Xaa can be any naturally occurring amino acid
  VARIANT 940: note = Xaa can be any naturally occurring amino acid except Pro or Gly
  VARIANT 941: note = Xaa can be any naturally occurring amino acid except Pro or Gly
  VARIANT 942: note = Xaa can be any naturally occurring amino acid except Pro or Gly
  VARIANT 943: note = Xaa can be any naturally occurring amino acid except Pro or Gly
  VARIANT 945: note = Xaa can be any naturally occurring amino acid
  VARIANT 946: note = Xaa can be any naturally occurring amino acid
  VARIANT 947: note = Xaa can be any naturally occurring amino acid
  VARIANT 949: note = Xaa can be any naturally occurring amino acid except Pro or Gly
  VARIANT 950: note = Xaa can be any naturally occurring amino acid except Pro or Gly
  VARIANT 951: note = Xaa can be any naturally occurring amino acid except Pro or Gly
  VARIANT 952: note = Xaa can be any naturally occurring amino acid except Pro or Gly
  VARIANT 954: note = Xaa can be any naturally occurring amino acid
  VARIANT 955: note = Xaa can be any naturally occurring amino acid
  VARIANT 956: note = Xaa can be any naturally occurring amino acid
  VARIANT 958: note = Xaa can be any naturally occurring amino acid except Pro or Gly
  VARIANT 959: note = Xaa can be any naturally occurring amino acid except Pro or Gly
  VARIANT 960: note = Xaa can be any naturally occurring amino acid except Pro or Gly
  VARIANT 961: note = Xaa can be any naturally occurring amino acid except Pro or Gly
  VARIANT 963: note = Xaa can be any naturally occurring amino acid
  VARIANT 964: note = Xaa can be any naturally occurring amino acid
  VARIANT 965: note = Xaa can be any naturally occurring amino acid
  VARIANT 967: note = Xaa can be any naturally occurring amino acid except Pro or Gly
  VARIANT 968: note = Xaa can be any naturally occurring amino acid except Pro or Gly
  VARIANT 969: note = Xaa can be any naturally occurring amino acid except Pro or Gly
  VARIANT 970: note = Xaa can be any naturally occurring amino acid except Pro or Gly
  VARIANT 972: note = Xaa can be any naturally occurring amino acid
  VARIANT 973: note = Xaa can be any naturally occurring amino acid
  VARIANT 974: note = Xaa can be any naturally occurring amino acid
  VARIANT 976: note = Xaa can be any naturally occurring amino acid except Pro or Gly
  VARIANT 977: note = Xaa can be any naturally occurring amino acid except Pro or Gly
  VARIANT 978: note = Xaa can be any naturally occurring amino acid except Pro or Gly
  VARIANT 979: note = Xaa can be any naturally occurring amino acid except Pro or Gly
  VARIANT 981: note = Xaa can be any naturally occurring amino acid
  VARIANT 982: note = Xaa can be any naturally occurring amino acid
  VARIANT 983: note = Xaa can be any naturally occurring amino acid
  VARIANT 985: note = Xaa can be any naturally occurring amino acid except Pro or Gly
  VARIANT 986: note = Xaa can be any naturally occurring amino acid except Pro or Gly
  VARIANT 987: note = Xaa can be any naturally occurring amino acid except Pro or Gly
  VARIANT 988: note = Xaa can be any naturally occurring amino acid except Pro or Gly
  VARIANT 990: note = Xaa can be any naturally occurring amino acid
  VARIANT 991: note = Xaa can be any naturally occurring amino acid
  VARIANT 992: note = Xaa can be any naturally occurring amino acid
  VARIANT 994: note = Xaa can be any naturally occurring amino acid except Pro or Gly
  VARIANT 995: note = Xaa can be any naturally occurring amino acid except Pro or Gly
  VARIANT 996: note = Xaa can be any naturally occurring amino acid except Pro or Gly
  VARIANT 997: note = Xaa can be any naturally occurring amino acid except Pro or Gly
  VARIANT 999: note = Xaa can be any naturally occurring amino acid
  VARIANT 1000: note = Xaa can be any naturally occurring amino acid
  VARIANT 1001: note = Xaa can be any naturally occurring amino acid
  VARIANT 1003: note = Xaa can be any naturally occurring amino acid except Pro or Gly
  VARIANT 1004: note = Xaa can be any naturally occurring amino acid except Pro or Gly
  VARIANT 1005: note = Xaa can be any naturally occurring amino acid except Pro or Gly
  VARIANT 1006: note = Xaa can be any naturally occurring amino acid except Pro or Gly
  VARIANT 1008: note = Xaa can be any naturally occurring amino acid
  VARIANT 1009: note = Xaa can be any naturally occurring amino acid
  VARIANT 1010: note = Xaa can be any naturally occurring amino acid
  VARIANT 1012: note = Xaa can be any naturally occurring amino acid except Pro or Gly
  VARIANT 1013: note = Xaa can be any naturally occurring amino acid except Pro or Gly
  VARIANT 1014: note = Xaa can be any naturally occurring amino acid except Pro or Gly
  VARIANT 1015: note = Xaa can be any naturally occurring amino acid except Pro or Gly
  VARIANT 1017: note = Xaa can be any naturally occurring amino acid
  VARIANT 1018: note = Xaa can be any naturally occurring amino acid
  VARIANT 1019: note = Xaa can be any naturally occurring amino acid
  VARIANT 1021: note = Xaa can be any naturally occurring amino acid except Pro or Gly
  VARIANT 1022: note = Xaa can be any naturally occurring amino acid except Pro or Gly
  VARIANT 1023: note = Xaa can be any naturally occurring amino acid except Pro or Gly
  VARIANT 1024: note = Xaa can be any naturally occurring amino acid except Pro or Gly
  VARIANT 1026: note = Xaa can be any naturally occurring amino acid
  VARIANT 1027: note = Xaa can be any naturally occurring amino acid
  VARIANT 1028: note = Xaa can be any naturally occurring amino acid
  VARIANT 1030: note = Xaa can be any naturally occurring amino acid except Pro or Gly
  VARIANT 1031: note = Xaa can be any naturally occurring amino acid except Pro or Gly
  VARIANT 1032: note = Xaa can be any naturally occurring amino acid except Pro or Gly
  VARIANT 1033: note = Xaa can be any naturally occurring amino acid except Pro or Gly
  VARIANT 1035: note = Xaa can be any naturally occurring amino acid
  VARIANT 1036: note = Xaa can be any naturally occurring amino acid
  VARIANT 1037: note = Xaa can be any naturally occurring amino acid
  VARIANT 1039: note = Xaa can be any naturally occurring amino acid except Pro or Gly
  VARIANT 1040: note = Xaa can be any naturally occurring amino acid except Pro or Gly
  VARIANT 1041: note = Xaa can be any naturally occurring amino acid except Pro or Gly
  VARIANT 1042: note = Xaa can be any naturally occurring amino acid except Pro or Gly
  VARIANT 1044: note = Xaa can be any naturally occurring amino acid
  VARIANT 1045: note = Xaa can be any naturally occurring amino acid
  VARIANT 1046: note = Xaa can be any naturally occurring amino acid
  VARIANT 1048: note = Xaa can be any naturally occurring amino acid except Pro or Gly
  VARIANT 1049: note = Xaa can be any naturally occurring amino acid except Pro or Gly
  VARIANT 1050: note = Xaa can be any naturally occurring amino acid except Pro or Gly
  VARIANT 1051: note = Xaa can be any naturally occurring amino acid except Pro or Gly
  VARIANT 1053: note = Xaa can be any naturally occurring amino acid
  VARIANT 1054: note = Xaa can be any naturally occurring amino acid
  VARIANT 1055: note = Xaa can be any naturally occurring amino acid
  VARIANT 1057: note = Xaa can be any naturally occurring amino acid except Pro or Gly
  VARIANT 1058: note = Xaa can be any naturally occurring amino acid except Pro or Gly
  VARIANT 1059: note = Xaa can be any naturally occurring amino acid except Pro or Gly
  VARIANT 1060: note = Xaa can be any naturally occurring amino acid except Pro or Gly
  VARIANT 1062: note = Xaa can be any naturally occurring amino acid
  VARIANT 1063: note = Xaa can be any naturally occurring amino acid
  VARIANT 1064: note = Xaa can be any naturally occurring amino acid
  VARIANT 1066: note = Xaa can be any naturally occurring amino acid except Pro or Gly
  VARIANT 1067: note = Xaa can be any naturally occurring amino acid except Pro or Gly
  VARIANT 1068: note = Xaa can be any naturally occurring amino acid except Pro or Gly
  VARIANT 1069: note = Xaa can be any naturally occurring amino acid except Pro or Gly
  VARIANT 1071: note = Xaa can be any naturally occurring amino acid
  VARIANT 1072: note = Xaa can be any naturally occurring amino acid
  VARIANT 1073: note = Xaa can be any naturally occurring amino acid
  VARIANT 1075: note = Xaa can be any naturally occurring amino acid except Pro or Gly
  VARIANT 1076: note = Xaa can be any naturally occurring amino acid except Pro or Gly
  VARIANT 1077: note = Xaa can be any naturally occurring amino acid except Pro or Gly
  VARIANT 1078: note = Xaa can be any naturally occurring amino acid except Pro or Gly
  VARIANT 1080: note = Xaa can be any naturally occurring amino acid
  VARIANT 1081: note = Xaa can be any naturally occurring amino acid
  VARIANT 1082: note = Xaa can be any naturally occurring amino acid
  VARIANT 1084: note = Xaa can be any naturally occurring amino acid except Pro or Gly
  VARIANT 1085: note = Xaa can be any naturally occurring amino acid except Pro or Gly
  VARIANT 1086: note = Xaa can be any naturally occurring amino acid except Pro or Gly
  VARIANT 1087: note = Xaa can be any naturally occurring amino acid except Pro or Gly
  VARIANT 1089: note = Xaa can be any naturally occurring amino acid
  VARIANT 1090: note = Xaa can be any naturally occurring amino acid
  VARIANT 1091: note = Xaa can be any naturally occurring amino acid
  VARIANT 1093: note = Xaa can be any naturally occurring amino acid except Pro or Gly
  VARIANT 1094: note = Xaa can be any naturally occurring amino acid except Pro or Gly
  VARIANT 1095: note = Xaa can be any naturally occurring amino acid except Pro or Gly
  VARIANT 1096: note = Xaa can be any naturally occurring amino acid except Pro or Gly
  VARIANT 1098: note = Xaa can be any naturally occurring amino acid
  VARIANT 1099: note = Xaa can be any naturally occurring amino acid
  VARIANT 1100: note = Xaa can be any naturally occurring amino acid
  VARIANT 1102: note = Xaa can be any naturally occurring amino acid except Pro or Gly
  VARIANT 1103: note = Xaa can be any naturally occurring amino acid except Pro or Gly
  VARIANT 1104: note = Xaa can be any naturally occurring amino acid except Pro or Gly
  VARIANT 1105: note = Xaa can be any naturally occurring amino acid except Pro or Gly
  VARIANT 1107: note = Xaa can be any naturally occurring amino acid
  VARIANT 1108: note = Xaa can be any naturally occurring amino acid
  VARIANT 1109: note = Xaa can be any naturally occurring amino acid
  VARIANT 1111: note = Xaa can be any naturally occurring amino acid except Pro or Gly
  VARIANT 1112: note = Xaa can be any naturally occurring amino acid except Pro or Gly
  VARIANT 1113: note = Xaa can be any naturally occurring amino acid except Pro or Gly
  VARIANT 1114: note = Xaa can be any naturally occurring amino acid except Pro or Gly
  VARIANT 1116: note = Xaa can be any naturally occurring amino acid
  VARIANT 1117: note = Xaa can be any naturally occurring amino acid
  VARIANT 1118: note = Xaa can be any naturally occurring amino acid
  VARIANT 1120: note = Xaa can be any naturally occurring amino acid except Pro or Gly
  VARIANT 1121: note = Xaa can be any naturally occurring amino acid except Pro or Gly
  VARIANT 1122: note = Xaa can be any naturally occurring amino acid except Pro or Gly
  VARIANT 1123: note = Xaa can be any naturally occurring amino acid except Pro or Gly
  VARIANT 1125: note = Xaa can be any naturally occurring amino acid
  VARIANT 1126: note = Xaa can be any naturally occurring amino acid
  VARIANT 1127: note = Xaa can be any naturally occurring amino acid
  VARIANT 1129: note = Xaa can be any naturally occurring amino acid except Pro or Gly
  VARIANT 1130: note = Xaa can be any naturally occurring amino acid except Pro or Gly
  VARIANT 1131: note = Xaa can be any naturally occurring amino acid except Pro or Gly
  VARIANT 1132: note = Xaa can be any naturally occurring amino acid except Pro or Gly
  VARIANT 1134: note = Xaa can be any naturally occurring amino acid
  VARIANT 1135: note = Xaa can be any naturally occurring amino acid
  VARIANT 1136: note = Xaa can be any naturally occurring amino acid
  VARIANT 1138: note = Xaa can be any naturally occurring amino acid except Pro or Gly
  VARIANT 1139: note = Xaa can be any naturally occurring amino acid except Pro or Gly
  VARIANT 1140: note = Xaa can be any naturally occurring amino acid except Pro or Gly
  VARIANT 1141: note = Xaa can be any naturally occurring amino acid except Pro or Gly
  VARIANT 1143: note = Xaa can be any naturally occurring amino acid
  VARIANT 1144: note = Xaa can be any naturally occurring amino acid
  VARIANT 1145: note = Xaa can be any naturally occurring amino acid
  VARIANT 1147: note = Xaa can be any naturally occurring amino acid except Pro or Gly
  VARIANT 1148: note = Xaa can be any naturally occurring amino acid except Pro or Gly
  VARIANT 1149: note = Xaa can be any naturally occurring amino acid except Pro or Gly
  VARIANT 1150: note = Xaa can be any naturally occurring amino acid except Pro or Gly
  VARIANT 1152: note = Xaa can be any naturally occurring amino acid
  VARIANT 1153: note = Xaa can be any naturally occurring amino acid
  VARIANT 1154: note = Xaa can be any naturally occurring amino acid
  VARIANT 1156: note = Xaa can be any naturally occurring amino acid except Pro or Gly
  VARIANT 1157: note = Xaa can be any naturally occurring amino acid except Pro or Gly
  VARIANT 1158: note = Xaa can be any naturally occurring amino acid except Pro or Gly
  VARIANT 1159: note = Xaa can be any naturally occurring amino acid except Pro or Gly
  VARIANT 1161: note = Xaa can be any naturally occurring amino acid
  VARIANT 1162: note = Xaa can be any naturally occurring amino acid
  VARIANT 1163: note = Xaa can be any naturally occurring amino acid
  VARIANT 1165: note = Xaa can be any naturally occurring amino acid except Pro or Gly
  VARIANT 1166: note = Xaa can be any naturally occurring amino acid except Pro or Gly
  VARIANT 1167: note = Xaa can be any naturally occurring amino acid except Pro or Gly
  VARIANT 1168: note = Xaa can be any naturally occurring amino acid except Pro or Gly
  VARIANT 1170: note = Xaa can be any naturally occurring amino acid
  VARIANT 1171: note = Xaa can be any naturally occurring amino acid
  VARIANT 1172: note = Xaa can be any naturally occurring amino acid
  VARIANT 1174: note = Xaa can be any naturally occurring amino acid except Pro or Gly
  VARIANT 1175: note = Xaa can be any naturally occurring amino acid except Pro or Gly
  VARIANT 1176: note = Xaa can be any naturally occurring amino acid except Pro or Gly
  VARIANT 1177: note = Xaa can be any naturally occurring amino acid except Pro or Gly
  VARIANT 1179: note = Xaa can be any naturally occurring amino acid
  VARIANT 1180: note = Xaa can be any naturally occurring amino acid
  VARIANT 1181: note = Xaa can be any naturally occurring amino acid
  VARIANT 1183: note = Xaa can be any naturally occurring amino acid except Pro or Gly
  VARIANT 1184: note = Xaa can be any naturally occurring amino acid except Pro or Gly
  VARIANT 1185: note = Xaa can be any naturally occurring amino acid except Pro or Gly
  VARIANT 1186: note = Xaa can be any naturally occurring amino acid except Pro or Gly
  VARIANT 1188: note = Xaa can be any naturally occurring amino acid
  VARIANT 1189: note = Xaa can be any naturally occurring amino acid
  VARIANT 1190: note = Xaa can be any naturally occurring amino acid
  VARIANT 1192: note = Xaa can be any naturally occurring amino acid except Pro or Gly
  VARIANT 1193: note = Xaa can be any naturally occurring amino acid except Pro or Gly
  VARIANT 1194: note = Xaa can be any naturally occurring amino acid except Pro or Gly
  VARIANT 1195: note = Xaa can be any naturally occurring amino acid except Pro or Gly
  VARIANT 1197: note = Xaa can be any naturally occurring amino acid
  VARIANT 1198: note = Xaa can be any naturally occurring amino acid
  VARIANT 1199: note = Xaa can be any naturally occurring amino acid
  VARIANT 1201: note = Xaa can be any naturally occurring amino acid except Pro or Gly
  VARIANT 1202: note = Xaa can be any naturally occurring amino acid except Pro or Gly
  VARIANT 1203: note = Xaa can be any naturally occurring amino acid except Pro or Gly
  VARIANT 1204: note = Xaa can be any naturally occurring amino acid except Pro or Gly
  VARIANT 1206: note = Xaa can be any naturally occurring amino acid
  VARIANT 1207: note = Xaa can be any naturally occurring amino acid
  VARIANT 1208: note = Xaa can be any naturally occurring amino acid
  VARIANT 1210: note = Xaa can be any naturally occurring amino acid except Pro or Gly
  VARIANT 1211: note = Xaa can be any naturally occurring amino acid except Pro or Gly
  VARIANT 1212: note = Xaa can be any naturally occurring amino acid except Pro or Gly
  VARIANT 1213: note = Xaa can be any naturally occurring amino acid except Pro or Gly
  VARIANT 1215: note = Xaa can be any naturally occurring amino acid
  VARIANT 1216: note = Xaa can be any naturally occurring amino acid
  VARIANT 1217: note = Xaa can be any naturally occurring amino acid
  VARIANT 1219: note = Xaa can be any naturally occurring amino acid except Pro or Gly
  VARIANT 1220: note = Xaa can be any naturally occurring amino acid except Pro or Gly
  VARIANT 1221: note = Xaa can be any naturally occurring amino acid except Pro or Gly
  VARIANT 1222: note = Xaa can be any naturally occurring amino acid except Pro or Gly
  VARIANT 1224: note = Xaa can be any naturally occurring amino acid
  VARIANT 1225: note = Xaa can be any naturally occurring amino acid
  VARIANT 1226: note = Xaa can be any naturally occurring amino acid
  VARIANT 1228: note = Xaa can be any naturally occurring amino acid except Pro or Gly
  VARIANT 1229: note = Xaa can be any naturally occurring amino acid except Pro or Gly
  VARIANT 1230: note = Xaa can be any naturally occurring amino acid except Pro or Gly
  VARIANT 1231: note = Xaa can be any naturally occurring amino acid except Pro or Gly
  VARIANT 1233: note = Xaa can be any naturally occurring amino acid
  VARIANT 1234: note = Xaa can be any naturally occurring amino acid
  VARIANT 1235: note = Xaa can be any naturally occurring amino acid
  VARIANT 1237: note = Xaa can be any naturally occurring amino acid except Pro or Gly
  VARIANT 1238: note = Xaa can be any naturally occurring amino acid except Pro or Gly
  VARIANT 1239: note = Xaa can be any naturally occurring amino acid except Pro or Gly
  VARIANT 1240: note = Xaa can be any naturally occurring amino acid except Pro or Gly
  VARIANT 1242: note = Xaa can be any naturally occurring amino acid
  VARIANT 1243: note = Xaa can be any naturally occurring amino acid
  VARIANT 1244: note = Xaa can be any naturally occurring amino acid
  VARIANT 1246: note = Xaa can be any naturally occurring amino acid except Pro or Gly
  VARIANT 1247: note = Xaa can be any naturally occurring amino acid except Pro or Gly
  VARIANT 1248: note = Xaa can be any naturally occurring amino acid except Pro or Gly
  VARIANT 1249: note = Xaa can be any naturally occurring amino acid except Pro or Gly
  VARIANT 1251: note = Xaa can be any naturally occurring amino acid
  VARIANT 1252: note = Xaa can be any naturally occurring amino acid
  VARIANT 1253: note = Xaa can be any naturally occurring amino acid
  VARIANT 1255: note = Xaa can be any naturally occurring amino acid except Pro or Gly
  VARIANT 1256: note = Xaa can be any naturally occurring amino acid except Pro or Gly
  VARIANT 1257: note = Xaa can be any naturally occurring amino acid except Pro or Gly
  VARIANT 1258: note = Xaa can be any naturally occurring amino acid except Pro or Gly
  VARIANT 1260: note = Xaa can be any naturally occurring amino acid
  VARIANT 1261: note = Xaa can be any naturally occurring amino acid
  VARIANT 1262: note = Xaa can be any naturally occurring amino acid
  VARIANT 1264: note = Xaa can be any naturally occurring amino acid except Pro or Gly
  VARIANT 1265: note = Xaa can be any naturally occurring amino acid except Pro or Gly
  VARIANT 1266: note = Xaa can be any naturally occurring amino acid except Pro or Gly
  VARIANT 1267: note = Xaa can be any naturally occurring amino acid except Pro or Gly
  VARIANT 1269: note = Xaa can be any naturally occurring amino acid
  VARIANT 1270: note = Xaa can be any naturally occurring amino acid
  VARIANT 1271: note = Xaa can be any naturally occurring amino acid
  VARIANT 1273: note = Xaa can be any naturally occurring amino acid except Pro or Gly
  VARIANT 1274: note = Xaa can be any naturally occurring amino acid except Pro or Gly
  VARIANT 1275: note = Xaa can be any naturally occurring amino acid except Pro or Gly
  VARIANT 1276: note = Xaa can be any naturally occurring amino acid except Pro or Gly
  VARIANT 1278: note = Xaa can be any naturally occurring amino acid
  VARIANT 1279: note = Xaa can be any naturally occurring amino acid
  VARIANT 1280: note = Xaa can be any naturally occurring amino acid
  VARIANT 1282: note = Xaa can be any naturally occurring amino acid except Pro or Gly
  VARIANT 1283: note = Xaa can be any naturally occurring amino acid except Pro or Gly
  VARIANT 1284: note = Xaa can be any naturally occurring amino acid except Pro or Gly
  VARIANT 1285: note = Xaa can be any naturally occurring amino acid except Pro or Gly
  VARIANT 1287: note = Xaa can be any naturally occurring amino acid
  VARIANT 1288: note = Xaa can be any naturally occurring amino acid
  VARIANT 1289: note = Xaa can be any naturally occurring amino acid
  VARIANT 1291: note = Xaa can be any naturally occurring amino acid except Pro or Gly
  VARIANT 1292: note = Xaa can be any naturally occurring amino acid except Pro or Gly
  VARIANT 1293: note = Xaa can be any naturally occurring amino acid except Pro or Gly
  VARIANT 1294: note = Xaa can be any naturally occurring amino acid except Pro or Gly
  VARIANT 1296: note = Xaa can be any naturally occurring amino acid
  VARIANT 1297: note = Xaa can be any naturally occurring amino acid
  VARIANT 1298: note = Xaa can be any naturally occurring amino acid
  VARIANT 1300: note = Xaa can be any naturally occurring amino acid except Pro or Gly
  VARIANT 1301: note = Xaa can be any naturally occurring amino acid except Pro or Gly
  VARIANT 1302: note = Xaa can be any naturally occurring amino acid except Pro or Gly
  VARIANT 1303: note = Xaa can be any naturally occurring amino acid except Pro or Gly
  VARIANT 1305: note = Xaa can be any naturally occurring amino acid
  VARIANT 1306: note = Xaa can be any naturally occurring amino acid
  VARIANT 1307: note = Xaa can be any naturally occurring amino acid
  VARIANT 1309: note = Xaa can be any naturally occurring amino acid except Pro or Gly
  VARIANT 1310: note = Xaa can be any naturally occurring amino acid except Pro or Gly
  VARIANT 1311: note = Xaa can be any naturally occurring amino acid except Pro or Gly
  VARIANT 1312: note = Xaa can be any naturally occurring amino acid except Pro or Gly
  VARIANT 1314: note = Xaa can be any naturally occurring amino acid
  VARIANT 1315: note = Xaa can be any naturally occurring amino acid
  VARIANT 1316: note = Xaa can be any naturally occurring amino acid
  VARIANT 1318: note = Xaa can be any naturally occurring amino acid except Pro or Gly
  VARIANT 1319: note = Xaa can be any naturally occurring amino acid except Pro or Gly
  VARIANT 1320: note = Xaa can be any naturally occurring amino acid except Pro or Gly
  VARIANT 1321: note = Xaa can be any naturally occurring amino acid except Pro or Gly
  VARIANT 1323: note = Xaa can be any naturally occurring amino acid
  VARIANT 1324: note = Xaa can be any naturally occurring amino acid
  VARIANT 1325: note = Xaa can be any naturally occurring amino acid
  VARIANT 1327: note = Xaa can be any naturally occurring amino acid except Pro or Gly
  VARIANT 1328: note = Xaa can be any naturally occurring amino acid except Pro or Gly
  VARIANT 1329: note = Xaa can be any naturally occurring amino acid except Pro or Gly
  VARIANT 1330: note = Xaa can be any naturally occurring amino acid except Pro or Gly
  VARIANT 1332: note = Xaa can be any naturally occurring amino acid
  VARIANT 1333: note = Xaa can be any naturally occurring amino acid
  VARIANT 1334: note = Xaa can be any naturally occurring amino acid
  VARIANT 1336: note = Xaa can be any naturally occurring amino acid except Pro or Gly
  VARIANT 1337: note = Xaa can be any naturally occurring amino acid except Pro or Gly
  VARIANT 1338: note = Xaa can be any naturally occurring amino acid except Pro or Gly
  VARIANT 1339: note = Xaa can be any naturally occurring amino acid except Pro or Gly
  VARIANT 1341: note = Xaa can be any naturally occurring amino acid
  VARIANT 1342: note = Xaa can be any naturally occurring amino acid
  VARIANT 1343: note = Xaa can be any naturally occurring amino acid
  VARIANT 1345: note = Xaa can be any naturally occurring amino acid except Pro or Gly
  VARIANT 1346: note = Xaa can be any naturally occurring amino acid except Pro or Gly
  VARIANT 1347: note = Xaa can be any naturally occurring amino acid except Pro or Gly
  VARIANT 1348: note = Xaa can be any naturally occurring amino acid except Pro or Gly
  VARIANT 1350: note = Xaa can be any naturally occurring amino acid
  VARIANT 1351: note = Xaa can be any naturally occurring amino acid
  VARIANT 1352: note = Xaa can be any naturally occurring amino acid
  VARIANT 1354: note = Xaa can be any naturally occurring amino acid except Pro or Gly
  VARIANT 1355: note = Xaa can be any naturally occurring amino acid except Pro or Gly
  VARIANT 1356: note = Xaa can be any naturally occurring amino acid except Pro or Gly
  VARIANT 1357: note = Xaa can be any naturally occurring amino acid except Pro or Gly
  VARIANT 1359: note = Xaa can be any naturally occurring amino acid
  VARIANT 1360: note = Xaa can be any naturally occurring amino acid
  VARIANT 1361: note = Xaa can be any naturally occurring amino acid
  VARIANT 1363: note = Xaa can be any naturally occurring amino acid except Pro or Gly
  VARIANT 1364: note = Xaa can be any naturally occurring amino acid except Pro or Gly
  VARIANT 1365: note = Xaa can be any naturally occurring amino acid except Pro or Gly
  VARIANT 1366: note = Xaa can be any naturally occurring amino acid except Pro or Gly
  VARIANT 1368: note = Xaa can be any naturally occurring amino acid
  VARIANT 1369: note = Xaa can be any naturally occurring amino acid
  VARIANT 1370: note = Xaa can be any naturally occurring amino acid
  VARIANT 1372: note = Xaa can be any naturally occurring amino acid except Pro or Gly
  VARIANT 1373: note = Xaa can be any naturally occurring amino acid except Pro or Gly
  VARIANT 1374: note = Xaa can be any naturally occurring amino acid except Pro or Gly
  VARIANT 1375: note = Xaa can be any naturally occurring amino acid except Pro or Gly
  VARIANT 1377: note = Xaa can be any naturally occurring amino acid
  VARIANT 1378: note = Xaa can be any naturally occurring amino acid
  VARIANT 1379: note = Xaa can be any naturally occurring amino acid
  VARIANT 1381: note = Xaa can be any naturally occurring amino acid except Pro or Gly
  VARIANT 1382: note = Xaa can be any naturally occurring amino acid except Pro or Gly
  VARIANT 1383: note = Xaa can be any naturally occurring amino acid except Pro or Gly
  VARIANT 1384: note = Xaa can be any naturally occurring amino acid except Pro or Gly
  VARIANT 1386: note = Xaa can be any naturally occurring amino acid
  VARIANT 1387: note = Xaa can be any naturally occurring amino acid
  VARIANT 1388: note = Xaa can be any naturally occurring amino acid
  VARIANT 1390: note = Xaa can be any naturally occurring amino acid except Pro or Gly
  VARIANT 1391: note = Xaa can be any naturally occurring amino acid except Pro or Gly
  VARIANT 1392: note = Xaa can be any naturally occurring amino acid except Pro or Gly
  VARIANT 1393: note = Xaa can be any naturally occurring amino acid except Pro or Gly
  VARIANT 1395: note = Xaa can be any naturally occurring amino acid
  VARIANT 1396: note = Xaa can be any naturally occurring amino acid
  VARIANT 1397: note = Xaa can be any naturally occurring amino acid
  VARIANT 1399: note = Xaa can be any naturally occurring amino acid except Pro or Gly
  VARIANT 1400: note = Xaa can be any naturally occurring amino acid except Pro or Gly
  VARIANT 1401: note = Xaa can be any naturally occurring amino acid except Pro or Gly
  VARIANT 1402: note = Xaa can be any naturally occurring amino acid except Pro or Gly
  VARIANT 1404: note = Xaa can be any naturally occurring amino acid
  VARIANT 1405: note = Xaa can be any naturally occurring amino acid
  VARIANT 1406: note = Xaa can be any naturally occurring amino acid
  VARIANT 1408: note = Xaa can be any naturally occurring amino acid except Pro or Gly
  VARIANT 1409: note = Xaa can be any naturally occurring amino acid except Pro or Gly
  VARIANT 1410: note = Xaa can be any naturally occurring amino acid except Pro or Gly
  VARIANT 1411: note = Xaa can be any naturally occurring amino acid except Pro or Gly
  VARIANT 1413: note = Xaa can be any naturally occurring amino acid
  VARIANT 1414: note = Xaa can be any naturally occurring amino acid
  VARIANT 1415: note = Xaa can be any naturally occurring amino acid
  VARIANT 1417: note = Xaa can be any naturally occurring amino acid except Pro or Gly
  VARIANT 1418: note = Xaa can be any naturally occurring amino acid except Pro or Gly
  VARIANT 1419: note = Xaa can be any naturally occurring amino acid except Pro or Gly
  VARIANT 1420: note = Xaa can be any naturally occurring amino acid except Pro or Gly
  VARIANT 1422: note = Xaa can be any naturally occurring amino acid
  VARIANT 1423: note = Xaa can be any naturally occurring amino acid
  VARIANT 1424: note = Xaa can be any naturally occurring amino acid
  VARIANT 1426: note = Xaa can be any naturally occurring amino acid except Pro or Gly
  VARIANT 1427: note = Xaa can be any naturally occurring amino acid except Pro or Gly
  VARIANT 1428: note = Xaa can be any naturally occurring amino acid except Pro or Gly
  VARIANT 1429: note = Xaa can be any naturally occurring amino acid except Pro or Gly
  VARIANT 1431: note = Xaa can be any naturally occurring amino acid
  VARIANT 1432: note = Xaa can be any naturally occurring amino acid
  VARIANT 1433: note = Xaa can be any naturally occurring amino acid
  VARIANT 1435: note = Xaa can be any naturally occurring amino acid except Pro or Gly
  VARIANT 1436: note = Xaa can be any naturally occurring amino acid except Pro or Gly
  VARIANT 1437: note = Xaa can be any naturally occurring amino acid except Pro or Gly
  VARIANT 1438: note = Xaa can be any naturally occurring amino acid except Pro or Gly
  VARIANT 1440: note = Xaa can be any naturally occurring amino acid
XXPXXXXGXXXPXXXXGXXXPXXXXGXXXPXXXXGXXXPXXXXGXXXPXXXXGXXXPXXXXGXXXPXXXXGXXXPXXXXGXXXPXXXXGXXXPXXXXGXXXPXXXXGXXXPXXXXGXXXPXXXXGXXXPXXXXGXXXPXXXXGXXXPXXXXGXXXPXXXXGXXXPXXXXGXXXPXXXXGXXXPXXXXGXXXPXXXXGXXXPXXXXGXXXPXXXXGXXXPXXXXGXXXPXXXXGXXXPXXXXGXXXPXXXXGXXXPXXXXGXXXPXXXXGXXXPXXXXGXXXPXXXXGXXXPXXXXGXXXPXXXXGXXXPXXXXGXXXPXXXXGXXXPXXXXGXXXPXXXXGXXXPXXXXGXXXPXXXXGXXXPXXXXGXXXPXXXXGXXXPXXXXGXXXPXXXXGXXXPXXXXGXXXPXXXXGXXXPXXXXGXXXPXXXXGXXXPXXXXGXXXPXXXXGXXXPXXXXGXXXPXXXXGXXXPXXXXGXXXPXXXXGXXXPXXXXGXXXPXXXXGXXXPXXXXGXXXPXXXXGXXXPXXXXGXXXPXXXXGXXXPXXXXGXXXPXXXXGXXXPXXXXGXXXPXXXXGXXXPXXXXGXXXPXXXXGXXXPXXXXGXXXPXXXXGXXXPXXXXGXXXPXXXXGXXXPXXXXGXXXPXXXXGXXXPXXXXGXXXPXXXXGXXXPXXXXGXXXPXXXXGXXXPXXXXGXXXPXXXXGXXXPXXXXGXXXPXXXXGXXXPXXXXGXXXPXXXXGXXXPXXXXGXXXPXXXXGXXXPXXXXGXXXPXXXXGXXXPXXXXGXXXPXXXXGXXXPXXXXGXXXPXXXXGXXXPXXXXGXXXPXXXXGXXXPXXXXGXXXPXXXXGXXXPXXXXGXXXPXXXXGXXXPXXXXGXXXPXXXXGXXXPXXXXGXXXPXXXXGXXXPXXXXGXXXPXXXXGXXXPXXXXGXXXPXXXXGXXXPXXXXGXXXPXXXXGXXXPXXXXGXXXPXXXXGXXXPXXXXGXXXPXXXXGXXXPXXXXGXXXPXXXXGXXXPXXXXGXXXPXXXXGXXXPXXXXGXXXPXXXXGXXXPXXXXGXXXPXXXXGXXXPXXXXGXXXPXXXXGXXXPXXXXGXXXPXXXXGXXXPXXXXGXXXPXXXXGXXXPXXXXGXXXPXXXXGXXXPXXXXGXXXPXXXXGXXXPXXXXGXXXPXXXXGXXXPXXXXGXXXPXXXXGXXXPXXXXGXXXPXXXXGXXXPXXXXGXXXPXXXXGXXXPXXXXGXXXPXXXXGXXXPXXXXGXXXPXXXXGXXXPXXXXGXXXPXXXXGXXXPXXXXGXXXPXXXXGXXXPXXXXGXXXPXXXXGXXXPXXXXGXXXPXXXXGXXXPXXXXGXXXPXXXXGXXXPXXXXGXXXPXXXXGXXXPXXXXGXXXPXXXXGXXXPXXXXGXXXPXXXXGXXXPXXXXGXXXPXXXXGXXXPXXXXGXXXPXXXXGX

SEQ ID NO: 149 - protein, 960 aa, synthetic construct
  REGION 1..960: note = elastin-like polypeptide
  VARIANT 1: note = Xaa can be any naturally occurring amino acid
  VARIANT 2: note = Xaa can be any naturally occurring amino acid
  VARIANT 4: note = Xaa can be any naturally occurring amino acid except Pro or Gly
  VARIANT 6: note = Xaa can be any naturally occurring amino acid
  VARIANT 7: note = Xaa can be any naturally occurring amino acid
  VARIANT 8: note = Xaa can be any naturally occurring amino acid
  VARIANT 10: note = Xaa can be any naturally occurring amino acid except Pro or Gly
  VARIANT 12: note = Xaa can be any naturally occurring amino acid
  VARIANT 13: note = Xaa can be any naturally occurring amino acid
  VARIANT 14: note = Xaa can be any naturally occurring amino acid
  VARIANT 16: note = Xaa can be any naturally occurring amino acid except Pro or Gly
  VARIANT 18: note = Xaa can be any naturally occurring amino acid
  VARIANT 19: note = Xaa can be any naturally occurring amino acid
  VARIANT 20: note = Xaa can be any naturally occurring amino acid
  VARIANT 22: note = Xaa can be any naturally occurring amino acid except Pro or Gly
  VARIANT 24: note = Xaa can be any naturally occurring amino acid
  VARIANT 25: note = Xaa can be any naturally occurring amino acid
  VARIANT 26: note = Xaa can be any naturally occurring amino acid
  VARIANT 28: note = Xaa can be any naturally occurring amino acid except Pro or Gly
  VARIANT 30: note = Xaa can be any naturally occurring amino acid
  VARIANT 31: note = Xaa can be any naturally occurring amino acid
  VARIANT 32: note = Xaa can be any naturally occurring amino acid
  VARIANT 34: note = Xaa can be any naturally occurring amino acid except Pro or Gly
  VARIANT 36: note = Xaa can be any naturally occurring amino acid
  VARIANT 37: note = Xaa can be any naturally occurring amino acid
  VARIANT 38: note = Xaa can be any naturally occurring amino acid
  VARIANT 40: note = Xaa can be any naturally occurring amino acid except Pro or Gly
  VARIANT 42: note = Xaa can be any naturally occurring amino acid
  VARIANT 43: note = Xaa can be any naturally occurring amino acid
  VARIANT 44: note = Xaa can be any naturally occurring amino acid
  VARIANT 46: note = Xaa can be any naturally occurring amino acid except Pro or Gly
  VARIANT 48: note = Xaa can be any naturally occurring amino acid
  VARIANT 49: note = Xaa can be any naturally occurring amino acid
  VARIANT 50: note = Xaa can be any naturally occurring amino acid
  VARIANT 52: note = Xaa can be any naturally occurring amino acid except Pro or Gly
  VARIANT 54: note = Xaa can be any naturally occurring amino acid
  VARIANT 55: note = Xaa can be any naturally occurring amino acid
  VARIANT 56: note = Xaa can be any naturally occurring amino acid
  VARIANT 58: note = Xaa can be any naturally occurring amino acid except Pro or Gly
  VARIANT 60: note = Xaa can be any naturally occurring amino acid
  VARIANT 61..960: note = May be present or absent in groups of the repeat unit Xaa Xaa ProXaa Gly Xaa Xaa
  VARIANT 61: note = Xaa can be any naturally occurring amino acid
  VARIANT 62: note = Xaa can be any naturally occurring amino acid
  VARIANT 64: note = Xaa can be any naturally occurring amino acid except Pro or Gly
  VARIANT 66: note = Xaa can be any naturally occurring amino acid
  VARIANT 67: note = Xaa can be any naturally occurring amino acid
  VARIANT 68: note = Xaa can be any naturally occurring amino acid
  VARIANT 70: note = Xaa can be any naturally occurring amino acid except Pro or Gly
  VARIANT 72: note = Xaa can be any naturally occurring amino acid
  VARIANT 73: note = Xaa can be any naturally occurring amino acid
  VARIANT 74: note = Xaa can be any naturally occurring amino acid
  VARIANT 76: note = Xaa can be any naturally occurring amino acid except Pro or Gly
  VARIANT 78: note = Xaa can be any naturally occurring amino acid
  VARIANT 79: note = Xaa can be any naturally occurring amino acid
  VARIANT 80: note = Xaa can be any naturally occurring amino acid
  VARIANT 82: note = Xaa can be any naturally occurring amino acid except Pro or Gly
  VARIANT 84: note = Xaa can be any naturally occurring amino acid
  VARIANT 85: note = Xaa can be any naturally occurring amino acid
  VARIANT 86: note = Xaa can be any naturally occurring amino acid
  VARIANT 88: note = Xaa can be any naturally occurring amino acid except Pro or Gly
  VARIANT 90: note = Xaa can be any naturally occurring amino acid
  VARIANT 91: note = Xaa can be any naturally occurring amino acid
  VARIANT 92: note = Xaa can be any naturally occurring amino acid
  VARIANT 94: note = Xaa can be any naturally occurring amino acid except Pro or Gly
  VARIANT 96: note = Xaa can be any naturally occurring amino acid
  VARIANT 97: note = Xaa can be any naturally occurring amino acid
  VARIANT 98: note = Xaa can be any naturally occurring amino acid
  VARIANT 100: note = Xaa can be any naturally occurring amino acid except Pro or Gly
  VARIANT 102: note = Xaa can be any naturally occurring amino acid
  VARIANT 103: note = Xaa can be any naturally occurring amino acid
  VARIANT 104: note = Xaa can be any naturally occurring amino acid
  VARIANT 106: note = Xaa can be any naturally occurring amino acid except Pro or Gly
  VARIANT 108: note = Xaa can be any naturally occurring amino acid
  VARIANT 109: note = Xaa can be any naturally occurring amino acid
  VARIANT 110: note = Xaa can be any naturally occurring amino acid
  VARIANT 112: note = Xaa can be any naturally occurring amino acid except Pro or Gly
  VARIANT 114: note = Xaa can be any naturally occurring amino acid
  VARIANT 115: note = Xaa can be any naturally occurring amino acid
  VARIANT 116: note = Xaa can be any naturally occurring amino acid
  VARIANT 118: note = Xaa can be any naturally occurring amino acid except Pro or Gly
  VARIANT 120: note = Xaa can be any naturally occurring amino acid
  VARIANT 121: note = Xaa can be any naturally occurring amino acid
  VARIANT 122: note = Xaa can be any naturally occurring amino acid
  VARIANT 124: note = Xaa can be any naturally occurring amino acid except Pro or Gly
  VARIANT 126: note = Xaa can be any naturally occurring amino acid
  VARIANT 127: note = Xaa can be any naturally occurring amino acid
  VARIANT 128: note = Xaa can be any naturally occurring amino acid
  VARIANT 130: note = Xaa can be any naturally occurring amino acid except Pro or Gly
  VARIANT 132: note = Xaa can be any naturally occurring amino acid
  VARIANT 133: note = Xaa can be any naturally occurring amino acid
  VARIANT 134: note = Xaa can be any naturally occurring amino acid
  VARIANT 136: note = Xaa can be any naturally occurring amino acid except Pro or Gly
  VARIANT 138: note = Xaa can be any naturally occurring amino acid
  VARIANT 139: note = Xaa can be any naturally occurring amino acid
  VARIANT 140: note = Xaa can be any naturally occurring amino acid
  VARIANT 142: note = Xaa can be any naturally occurring amino acid except Pro or Gly
  VARIANT 144: note = Xaa can be any naturally occurring amino acid
  VARIANT 145: note = Xaa can be any naturally occurring amino acid
  VARIANT 146: note = Xaa can be any naturally occurring amino acid
  VARIANT 148: note = Xaa can be any naturally occurring amino acid except Pro or Gly
  VARIANT 150: note = Xaa can be any naturally occurring amino acid
  VARIANT 151: note = Xaa can be any naturally occurring amino acid
  VARIANT 152: note = Xaa can be any naturally occurring amino acid
  VARIANT 154: note = Xaa can be any naturally occurring amino acid except Pro or Gly
  VARIANT 156: note = Xaa can be any naturally occurring amino acid
  VARIANT 157: note = Xaa can be any naturally occurring amino acid
  VARIANT 158: note = Xaa can be any naturally occurring amino acid
  VARIANT 160: note = Xaa can be any naturally occurring amino acid except Pro or Gly
  VARIANT 162: note = Xaa can be any naturally occurring amino acid
  VARIANT 163: note = Xaa can be any naturally occurring amino acid
  VARIANT 164: note = Xaa can be any naturally occurring amino acid
  VARIANT 166: note = Xaa can be any naturally occurring amino acid except Pro or Gly
  VARIANT 168: note = Xaa can be any naturally occurring amino acid
  VARIANT 169: note = Xaa can be any naturally occurring amino acid
  VARIANT 170: note = Xaa can be any naturally occurring amino acid
  VARIANT 172: note = Xaa can be any naturally occurring amino acid except Pro or Gly
  VARIANT 174: note = Xaa can be any naturally occurring amino acid
  VARIANT 175: note = Xaa can be any naturally occurring amino acid
  VARIANT 176: note = Xaa can be any naturally occurring amino acid
  VARIANT 178: note = Xaa can be any naturally occurring amino acid except Pro or Gly
  VARIANT 180: note = Xaa can be any naturally occurring amino acid
  VARIANT 181: note = Xaa can be any naturally occurring amino acid
  VARIANT 182: note = Xaa can be any naturally occurring amino acid
  VARIANT 184: note = Xaa can be any naturally occurring amino acid except Pro or Gly
  VARIANT 186: note = Xaa can be any naturally occurring amino acid
  VARIANT 187: note = Xaa can be any naturally occurring amino acid
  VARIANT 188: note = Xaa can be any naturally occurring amino acid
  VARIANT 190: note = Xaa can be any naturally occurring amino acid except Pro or Gly
  VARIANT 192: note = Xaa can be any naturally occurring amino acid
  VARIANT 193: note = Xaa can be any naturally occurring amino acid
  VARIANT 194: note = Xaa can be any naturally occurring amino acid
  VARIANT 196: note = Xaa can be any naturally occurring amino acid except Pro or Gly
  VARIANT 198: note = Xaa can be any naturally occurring amino acid
  VARIANT 199: note = Xaa can be any naturally occurring amino acid
  VARIANT 200: note = Xaa can be any naturally occurring amino acid
  VARIANT 202: note = Xaa can be any naturally occurring amino acid except Pro or Gly
  VARIANT 204: note = Xaa can be any naturally occurring amino acid
  VARIANT 205: note = Xaa can be any naturally occurring amino acid
  VARIANT 206: note = Xaa can be any naturally occurring amino acid
  VARIANT 208: note = Xaa can be any naturally occurring amino acid except Pro or Gly
  VARIANT 210: note = Xaa can be any naturally occurring amino acid
  VARIANT 211: note = Xaa can be any naturally occurring amino acid
  VARIANT 212: note = Xaa can be any naturally occurring amino acid
  VARIANT 214: note = Xaa can be any naturally occurring amino acid except Pro or Gly
  VARIANT 216: note = Xaa can be any naturally occurring amino acid
  VARIANT 217: note = Xaa can be any naturally occurring amino acid
  VARIANT 218: note = Xaa can be any naturally occurring amino acid
  VARIANT 220: note = Xaa can be any naturally occurring amino acid except Pro or Gly
  VARIANT 222: note = Xaa can be any naturally occurring amino acid
  VARIANT 223: note = Xaa can be any naturally occurring amino acid
  VARIANT 224: note = Xaa can be any naturally occurring amino acid
  VARIANT 226: note = Xaa can be any naturally occurring amino acid except Pro or Gly
  VARIANT 228: note = Xaa can be any naturally occurring amino acid
  VARIANT 229: note = Xaa can be any naturally occurring amino acid
  VARIANT 230: note = Xaa can be any naturally occurring amino acid
  VARIANT 232: note = Xaa can be any naturally occurring amino acid except Pro or Gly
  VARIANT 234: note = Xaa can be any naturally occurring amino acid
  VARIANT 235: note = Xaa can be any naturally occurring amino acid
  VARIANT 236: note = Xaa can be any naturally occurring amino acid
  VARIANT 238: note = Xaa can be any naturally occurring amino acid except Pro or Gly
  VARIANT 240: note = Xaa can be any naturally occurring amino acid
  VARIANT 241: note = Xaa can be any naturally occurring amino acid
  VARIANT 242: note = Xaa can be any naturally occurring amino acid
  VARIANT 244: note = Xaa can be any naturally occurring amino acid except Pro or Gly
  VARIANT 246: note = Xaa can be any naturally occurring amino acid
  VARIANT 247: note = Xaa can be any naturally occurring amino acid
  VARIANT 248: note = Xaa can be any naturally occurring amino acid
  VARIANT 250: note = Xaa can be any naturally occurring amino acid except Pro or Gly
  VARIANT 252: note = Xaa can be any naturally occurring amino acid
  VARIANT 253: note = Xaa can be any naturally occurring amino acid
  VARIANT 254: note = Xaa can be any naturally occurring amino acid
  VARIANT 256: note = Xaa can be any naturally occurring amino acid except Pro or Gly
  VARIANT 258: note = Xaa can be any naturally occurring amino acid
  VARIANT 259: note = Xaa can be any naturally occurring amino acid
  VARIANT 260: note = Xaa can be any naturally occurring amino acid
  VARIANT 262: note = Xaa can be any naturally occurring amino acid except Pro or Gly
  VARIANT 264: note = Xaa can be any naturally occurring amino acid
  VARIANT 265: note = Xaa can be any naturally occurring amino acid
  VARIANT 266: note = Xaa can be any naturally occurring amino acid
  VARIANT 268: note = Xaa can be any naturally occurring amino acid except Pro or Gly
  VARIANT 270: note = Xaa can be any naturally occurring amino acid
  VARIANT 271: note = Xaa can be any naturally occurring amino acid
  VARIANT 272: note = Xaa can be any naturally occurring amino acid
  VARIANT 274: note = Xaa can be any naturally occurring amino acid except Pro or Gly
  VARIANT 276: note = Xaa can be any naturally occurring amino acid
  VARIANT 277: note = Xaa can be any naturally occurring amino acid
  VARIANT 278: note = Xaa can be any naturally occurring amino acid
  VARIANT 280: note = Xaa can be any naturally occurring amino acid except Pro or Gly
  VARIANT 282: note = Xaa can be any naturally occurring amino acid
  VARIANT 283: note = Xaa can be any naturally occurring amino acid
  VARIANT 284: note = Xaa can be any naturally occurring amino acid
  VARIANT 286: note = Xaa can be any naturally occurring amino acid except Pro or Gly
  VARIANT 288: note = Xaa can be any naturally occurring amino acid
  VARIANT 289: note = Xaa can be any naturally occurring amino acid
  VARIANT 290: note = Xaa can be any naturally occurring amino acid
  VARIANT 292: note = Xaa can be any naturally occurring amino acid except Pro or Gly
  VARIANT 294: note = Xaa can be any naturally occurring amino acid
  VARIANT 295: note = Xaa can be any naturally occurring amino acid
  VARIANT 296: note = Xaa can be any naturally occurring amino acid
  VARIANT 298: note = Xaa can be any naturally occurring amino acid except Pro or Gly
  VARIANT 300: note = Xaa can be any naturally occurring amino acid
  VARIANT 301: note = Xaa can be any naturally occurring amino acid
  VARIANT 302: note = Xaa can be any naturally occurring amino acid
  VARIANT 304: note = Xaa can be any naturally occurring amino acid except Pro or Gly
  VARIANT 306: note = Xaa can be any naturally occurring amino acid
  VARIANT 307: note = Xaa can be any naturally occurring amino acid
  VARIANT 308: note = Xaa can be any naturally occurring amino acid
  VARIANT 310: note = Xaa can be any naturally occurring amino acid except Pro or Gly
  VARIANT 312: note = Xaa can be any naturally occurring amino acid
  VARIANT 313: note = Xaa can be any naturally occurring amino acid
  VARIANT 314: note = Xaa can be any naturally occurring amino acid
  VARIANT 316: note = Xaa can be any naturally occurring amino acid except Pro or Gly
  VARIANT 318: note = Xaa can be any naturally occurring amino acid
  VARIANT 319: note = Xaa can be any naturally occurring amino acid
  VARIANT 320: note = Xaa can be any naturally occurring amino acid
  VARIANT 322: note = Xaa can be any naturally occurring amino acid except Pro or Gly
  VARIANT 324: note = Xaa can be any naturally occurring amino acid
  VARIANT 325: note = Xaa can be any naturally occurring amino acid
  VARIANT 326: note = Xaa can be any naturally occurring amino acid
  VARIANT 328: note = Xaa can be any naturally occurring amino acid except Pro or Gly
  VARIANT 330: note = Xaa can be any naturally occurring amino acid
  VARIANT 331: note = Xaa can be any naturally occurring amino acid
  VARIANT 332: note = Xaa can be any naturally occurring amino acid
  VARIANT 334: note = Xaa can be any naturally occurring amino acid except Pro or Gly
  VARIANT 336: note = Xaa can be any naturally occurring amino acid
  VARIANT 337: note = Xaa can be any naturally occurring amino acid
  VARIANT 338: note = Xaa can be any naturally occurring amino acid
  VARIANT 340: note = Xaa can be any naturally occurring amino acid except Pro or Gly
  VARIANT 342: note = Xaa can be any naturally occurring amino acid
  VARIANT 343: note = Xaa can be any naturally occurring amino acid
  VARIANT 344: note = Xaa can be any naturally occurring amino acid
  VARIANT 346: note = Xaa can be any naturally occurring amino acid except Pro or Gly
  VARIANT 348: note = Xaa can be any naturally occurring amino acid
  VARIANT 349: note = Xaa can be any naturally occurring amino acid
  VARIANT 350: note = Xaa can be any naturally occurring amino acid
  VARIANT 352: note = Xaa can be any naturally occurring amino acid except Pro or Gly
  VARIANT 354: note = Xaa can be any naturally occurring amino acid
  VARIANT 355: note = Xaa can be any naturally occurring amino acid
  VARIANT 356: note = Xaa can be any naturally occurring amino acid
  VARIANT 358: note = Xaa can be any naturally occurring amino acid except Pro or Gly
  VARIANT 360: note = Xaa can be any naturally occurring amino acid
  VARIANT 361: note = Xaa can be any naturally occurring amino acid
  VARIANT 362: note = Xaa can be any naturally occurring amino acid
  VARIANT 364: note = Xaa can be any naturally occurring amino acid except Pro or Gly
  VARIANT 366: note = Xaa can be any naturally occurring amino acid
  VARIANT 367: note = Xaa can be any naturally occurring amino acid
  VARIANT 368: note = Xaa can be any naturally occurring amino acid
  VARIANT 370: note = Xaa can be any naturally occurring amino acid except Pro or Gly
  VARIANT 372: note = Xaa can be any naturally occurring amino acid
  VARIANT 373: note = Xaa can be any naturally occurring amino acid
  VARIANT 374: note = Xaa can be any naturally occurring amino acid
  VARIANT 376: note = Xaa can be any naturally occurring amino acid except Pro or Gly
  VARIANT 378: note = Xaa can be any naturally occurring amino acid
  VARIANT 379: note = Xaa can be any naturally occurring amino acid
  VARIANT 380: note = Xaa can be any naturally occurring amino acid
  VARIANT 382: note = Xaa can be any naturally occurring amino acid except Pro or Gly
  VARIANT 384: note = Xaa can be any naturally occurring amino acid
  VARIANT 385: note = Xaa can be any naturally occurring amino acid
  VARIANT 386: note = Xaa can be any naturally occurring amino acid
  VARIANT 388: note = Xaa can be any naturally occurring amino acid except Pro or Gly
  VARIANT 390: note = Xaa can be any naturally occurring amino acid
  VARIANT 391: note = Xaa can be any naturally occurring amino acid
  VARIANT 392: note = Xaa can be any naturally occurring amino acid
  VARIANT 394: note = Xaa can be any naturally occurring amino acid except Pro or Gly
  VARIANT 396: note = Xaa can be any naturally occurring amino acid
  VARIANT 397: note = Xaa can be any naturally occurring amino acid
  VARIANT 398: note = Xaa can be any naturally occurring amino acid
  VARIANT 400: note = Xaa can be any naturally occurring amino acid except Pro or Gly
  VARIANT 402: note = Xaa can be any naturally occurring amino acid
  VARIANT 403: note = Xaa can be any naturally occurring amino acid
  VARIANT 404: note = Xaa can be any naturally occurring amino acid
  VARIANT 406: note = Xaa can be any naturally occurring amino acid except Pro or Gly
  VARIANT 408: note = Xaa can be any naturally occurring amino acid
  VARIANT 409: note = Xaa can be any naturally occurring amino acid
  VARIANT 410: note = Xaa can be any naturally occurring amino acid
  VARIANT 412: note = Xaa can be any naturally occurring amino acid except Pro or Gly
  VARIANT 414: note = Xaa can be any naturally occurring amino acid
  VARIANT 415: note = Xaa can be any naturally occurring amino acid
  VARIANT 416: note = Xaa can be any naturally occurring amino acid
  VARIANT 418: note = Xaa can be any naturally occurring amino acid except Pro or Gly
  VARIANT 420: note = Xaa can be any naturally occurring amino acid
  VARIANT 421: note = Xaa can be any naturally occurring amino acid
  VARIANT 422: note = Xaa can be any naturally occurring amino acid
  VARIANT 424: note = Xaa can be any naturally occurring amino acid except Pro or Gly
  VARIANT 426: note = Xaa can be any naturally occurring amino acid
  VARIANT 427: note = Xaa can be any naturally occurring amino acid
  VARIANT 428: note = Xaa can be any naturally occurring amino acid
  VARIANT 430: note = Xaa can be any naturally occurring amino acid except Pro or Gly
  VARIANT 432: note = Xaa can be any naturally occurring amino acid
  VARIANT 433: note = Xaa can be any naturally occurring amino acid
  VARIANT 434: note = Xaa can be any naturally occurring amino acid
  VARIANT 436: note = Xaa can be any naturally occurring amino acid except Pro or Gly
  VARIANT 438: note = Xaa can be any naturally occurring amino acid
  VARIANT 439: note = Xaa can be any naturally occurring amino acid
  VARIANT 440: note = Xaa can be any naturally occurring amino acid
  VARIANT 442: note = Xaa can be any naturally occurring amino acid except Pro or Gly
  VARIANT 444: note = Xaa can be any naturally occurring amino acid
  VARIANT 445: note = Xaa can be any naturally occurring amino acid
  VARIANT 446: note = Xaa can be any naturally occurring amino acid
  VARIANT 448: note = Xaa can be any naturally occurring amino acid except Pro or Gly
  VARIANT 450: note = Xaa can be any naturally occurring amino acid
  VARIANT 451: note = Xaa can be any naturally occurring amino acid
  VARIANT 452: note = Xaa can be any naturally occurring amino acid
  VARIANT 454: note = Xaa can be any naturally occurring amino acid except Pro or Gly
  VARIANT 456: note = Xaa can be any naturally occurring amino acid
  VARIANT 457: note = Xaa can be any naturally occurring amino acid
  VARIANT 458: note = Xaa can be any naturally occurring amino acid
  VARIANT 460: note = Xaa can be any naturally occurring amino acid except Pro or Gly
  VARIANT 462: note = Xaa can be any naturally occurring amino acid
  VARIANT 463: note = Xaa can be any naturally occurring amino acid
  VARIANT 464: note = Xaa can be any naturally occurring amino acid
  VARIANT 466: note = Xaa can be any naturally occurring amino acid except Pro or Gly
  VARIANT 468: note = Xaa can be any naturally occurring amino acid
  VARIANT 469: note = Xaa can be any naturally occurring amino acid
  VARIANT 470: note = Xaa can be any naturally occurring amino acid
  VARIANT 472: note = Xaa can be any naturally occurring amino acid except Pro or Gly
  VARIANT 474: note = Xaa can be any naturally occurring amino acid
  VARIANT 475: note = Xaa can be any naturally occurring amino acid
  VARIANT 476: note = Xaa can be any naturally occurring amino acid
  VARIANT 478: note = Xaa can be any naturally occurring amino acid except Pro or Gly
  VARIANT 480: note = Xaa can be any naturally occurring amino acid
  VARIANT 481: note = Xaa can be any naturally occurring amino acid
  VARIANT 482: note = Xaa can be any naturally occurring amino acid
  VARIANT 484: note = Xaa can be any naturally occurring amino acid except Pro or Gly
  VARIANT 486: note = Xaa can be any naturally occurring amino acid
  VARIANT 487: note = Xaa can be any naturally occurring amino acid
  VARIANT 488: note = Xaa can be any naturally occurring amino acid
  VARIANT 490: note = Xaa can be any naturally occurring amino acid except Pro or Gly
  VARIANT 492: note = Xaa can be any naturally occurring amino acid
  VARIANT 493: note = Xaa can be any naturally occurring amino acid
  VARIANT 494: note = Xaa can be any naturally occurring amino acid
  VARIANT 496: note = Xaa can be any naturally occurring amino acid except Pro or Gly
  VARIANT 498: note = Xaa can be any naturally occurring amino acid
  VARIANT 499: note = Xaa can be any naturally occurring amino acid
  VARIANT 500: note = Xaa can be any naturally occurring amino acid
  VARIANT 502: note = Xaa can be any naturally occurring amino acid except Pro or Gly
  VARIANT 504: note = Xaa can be any naturally occurring amino acid
  VARIANT 505: note = Xaa can be any naturally occurring amino acid
  VARIANT 506: note = Xaa can be any naturally occurring amino acid
  VARIANT 508: note = Xaa can be any naturally occurring amino acid except Pro or Gly
  VARIANT 510: note = Xaa can be any naturally occurring amino acid
  VARIANT 511: note = Xaa can be any naturally occurring amino acid
  VARIANT 512: note = Xaa can be any naturally occurring amino acid
  VARIANT 514: note = Xaa can be any naturally occurring amino acid except Pro or Gly
  VARIANT 516: note = Xaa can be any naturally occurring amino acid
  VARIANT 517: note = Xaa can be any naturally occurring amino acid
  VARIANT 518: note = Xaa can be any naturally occurring amino acid
  VARIANT 520: note = Xaa can be any naturally occurring amino acid except Pro or Gly
  VARIANT 522: note = Xaa can be any naturally occurring amino acid
  VARIANT 523: note = Xaa can be any naturally occurring amino acid
  VARIANT 524: note = Xaa can be any naturally occurring amino acid
  VARIANT 526: note = Xaa can be any naturally occurring amino acid except Pro or Gly
  VARIANT 528: note = Xaa can be any naturally occurring amino acid
  VARIANT 529: note = Xaa can be any naturally occurring amino acid
  VARIANT 530: note = Xaa can be any naturally occurring amino acid
  VARIANT 532: note = Xaa can be any naturally occurring amino acid except Pro or Gly
  VARIANT 534: note = Xaa can be any naturally occurring amino acid
  VARIANT 535: note = Xaa can be any naturally occurring amino acid
  VARIANT 536: note = Xaa can be any naturally occurring amino acid
  VARIANT 538: note = Xaa can be any naturally occurring amino acid except Pro or Gly
  VARIANT 540: note = Xaa can be any naturally occurring amino acid
  VARIANT 541: note = Xaa can be any naturally occurring amino acid
  VARIANT 542: note = Xaa can be any naturally occurring amino acid
  VARIANT 544: note = Xaa can be any naturally occurring amino acid except Pro or Gly
  VARIANT 546: note = Xaa can be any naturally occurring amino acid
  VARIANT 547: note = Xaa can be any naturally occurring amino acid
  VARIANT 548: note = Xaa can be any naturally occurring amino acid
  VARIANT 550: note = Xaa can be any naturally occurring amino acid except Pro or Gly
  VARIANT 552: note = Xaa can be any naturally occurring amino acid
  VARIANT 553: note = Xaa can be any naturally occurring amino acid
  VARIANT 554: note = Xaa can be any naturally occurring amino acid
  VARIANT 556: note = Xaa can be any naturally occurring amino acid except Pro or Gly
  VARIANT 558: note = Xaa can be any naturally occurring amino acid
  VARIANT 559: note = Xaa can be any naturally occurring amino acid
  VARIANT 560: note = Xaa can be any naturally occurring amino acid
  VARIANT 562: note = Xaa can be any naturally occurring amino acid except Pro or Gly
  VARIANT 564: note = Xaa can be any naturally occurring amino acid
  VARIANT 565: note = Xaa can be any naturally occurring amino acid
  VARIANT 566: note = Xaa can be any naturally occurring amino acid
  VARIANT 568: note = Xaa can be any naturally occurring amino acid except Pro or Gly
  VARIANT 570: note = Xaa can be any naturally occurring amino acid
  VARIANT 571: note = Xaa can be any naturally occurring amino acid
  VARIANT 572: note = Xaa can be any naturally occurring amino acid
  VARIANT 574: note = Xaa can be any naturally occurring amino acid except Pro or Gly
  VARIANT 576: note = Xaa can be any naturally occurring amino acid
  VARIANT 577: note = Xaa can be any naturally occurring amino acid
  VARIANT 578: note = Xaa can be any naturally occurring amino acid
  VARIANT 580: note = Xaa can be any naturally occurring amino acid except Pro or Gly
  VARIANT 582: note = Xaa can be any naturally occurring amino acid
  VARIANT 583: note = Xaa can be any naturally occurring amino acid
  VARIANT 584: note = Xaa can be any naturally occurring amino acid
  VARIANT 586: note = Xaa can be any naturally occurring amino acid except Pro or Gly
  VARIANT 588: note = Xaa can be any naturally occurring amino acid
  VARIANT 589: note = Xaa can be any naturally occurring amino acid
  VARIANT 590: note = Xaa can be any naturally occurring amino acid
  VARIANT 592: note = Xaa can be any naturally occurring amino acid except Pro or Gly
  VARIANT 594: note = Xaa can be any naturally occurring amino acid
  VARIANT 595: note = Xaa can be any naturally occurring amino acid
  VARIANT 596: note = Xaa can be any naturally occurring amino acid
  VARIANT 598: note = Xaa can be any naturally occurring amino acid except Pro or Gly
  VARIANT 600: note = Xaa can be any naturally occurring amino acid
  VARIANT 601: note = Xaa can be any naturally occurring amino acid
  VARIANT 602: note = Xaa can be any naturally occurring amino acid
  VARIANT 604: note = Xaa can be any naturally occurring amino acid except Pro or Gly
  VARIANT 606: note = Xaa can be any naturally occurring amino acid
  VARIANT 607: note = Xaa can be any naturally occurring amino acid
  VARIANT 608: note = Xaa can be any naturally occurring amino acid
  VARIANT 610: note = Xaa can be any naturally occurring amino acid except Pro or Gly
  VARIANT 612: note = Xaa can be any naturally occurring amino acid
  VARIANT 613: note = Xaa can be any naturally occurring amino acid
  VARIANT 614: note = Xaa can be any naturally occurring amino acid
  VARIANT 616: note = Xaa can be any naturally occurring amino acid except Pro or Gly
  VARIANT 618: note = Xaa can be any naturally occurring amino acid
  VARIANT 619: note = Xaa can be any naturally occurring amino acid
  VARIANT 620: note = Xaa can be any naturally occurring amino acid
  VARIANT 622: note = Xaa can be any naturally occurring amino acid except Pro or Gly
  VARIANT 624: note = Xaa can be any naturally occurring amino acid
  VARIANT 625: note = Xaa can be any naturally occurring amino acid
  VARIANT 626: note = Xaa can be any naturally occurring amino acid
  VARIANT 628: note = Xaa can be any naturally occurring amino acid except Pro or Gly
  VARIANT 630: note = Xaa can be any naturally occurring amino acid
  VARIANT 631: note = Xaa can be any naturally occurring amino acid
  VARIANT 632: note = Xaa can be any naturally occurring amino acid
  VARIANT 634: note = Xaa can be any naturally occurring amino acid except Pro or Gly
  VARIANT 636: note = Xaa can be any naturally occurring amino acid
  VARIANT 637: note = Xaa can be any naturally occurring amino acid
  VARIANT 638: note = Xaa can be any naturally occurring amino acid
  VARIANT 640: note = Xaa can be any naturally occurring amino acid except Pro or Gly
  VARIANT 642: note = Xaa can be any naturally occurring amino acid
  VARIANT 643: note = Xaa can be any naturally occurring amino acid
  VARIANT 644: note = Xaa can be any naturally occurring amino acid
  VARIANT 646: note = Xaa can be any naturally occurring amino acid except Pro or Gly
  VARIANT 648: note = Xaa can be any naturally occurring amino acid
  VARIANT 649: note = Xaa can be any naturally occurring amino acid
  VARIANT 650: note = Xaa can be any naturally occurring amino acid
  VARIANT 652: note = Xaa can be any naturally occurring amino acid except Pro or Gly
  VARIANT 654: note = Xaa can be any naturally occurring amino acid
  VARIANT 655: note = Xaa can be any naturally occurring amino acid
  VARIANT 656: note = Xaa can be any naturally occurring amino acid
  VARIANT 658: note = Xaa can be any naturally occurring amino acid except Pro or Gly
  VARIANT 660: note = Xaa can be any naturally occurring amino acid
  VARIANT 661: note = Xaa can be any naturally occurring amino acid
  VARIANT 662: note = Xaa can be any naturally occurring amino acid
  VARIANT 664: note = Xaa can be any naturally occurring amino acid except Pro or Gly
  VARIANT 666: note = Xaa can be any naturally occurring amino acid
  VARIANT 667: note = Xaa can be any naturally occurring amino acid
  VARIANT 668: note = Xaa can be any naturally occurring amino acid
  VARIANT 670: note = Xaa can be any naturally occurring amino acid except Pro or Gly
  VARIANT 672: note = Xaa can be any naturally occurring amino acid
  VARIANT 673: note = Xaa can be any naturally occurring amino acid
  VARIANT 674: note = Xaa can be any naturally occurring amino acid
  VARIANT 676: note = Xaa can be any naturally occurring amino acid except Pro or Gly
  VARIANT 678: note = Xaa can be any naturally occurring amino acid
  VARIANT 679: note = Xaa can be any naturally occurring amino acid
  VARIANT 680: note = Xaa can be any naturally occurring amino acid
  VARIANT 682: note = Xaa can be any naturally occurring amino acid except Pro or Gly
  VARIANT 684: note = Xaa can be any naturally occurring amino acid
  VARIANT 685: note = Xaa can be any naturally occurring amino acid
  VARIANT 686: note = Xaa can be any naturally occurring amino acid
  VARIANT 688: note = Xaa can be any naturally occurring amino acid except Pro or Gly
  VARIANT 690: note = Xaa can be any naturally occurring amino acid
  VARIANT 691: note = Xaa can be any naturally occurring amino acid
  VARIANT 692: note = Xaa can be any naturally occurring amino acid
  VARIANT 694: note = Xaa can be any naturally occurring amino acid except Pro or Gly
  VARIANT 696: note = Xaa can be any naturally occurring amino acid
  VARIANT 697: note = Xaa can be any naturally occurring amino acid
  VARIANT 698: note = Xaa can be any naturally occurring amino acid
  VARIANT 700: note = Xaa can be any naturally occurring amino acid except Pro or Gly
  VARIANT 702: note = Xaa can be any naturally occurring amino acid
  VARIANT 703: note = Xaa can be any naturally occurring amino acid
  VARIANT 704: note = Xaa can be any naturally occurring amino acid
  VARIANT 706: note = Xaa can be any naturally occurring amino acid except Pro or Gly
  VARIANT 708: note = Xaa can be any naturally occurring amino acid
  VARIANT 709: note = Xaa can be any naturally occurring amino acid
  VARIANT 710: note = Xaa can be any naturally occurring amino acid
  VARIANT 712: note = Xaa can be any naturally occurring amino acid except Pro or Gly
  VARIANT 714: note = Xaa can be any naturally occurring amino acid
  VARIANT 715: note = Xaa can be any naturally occurring amino acid
  VARIANT 716: note = Xaa can be any naturally occurring amino acid
  VARIANT 718: note = Xaa can be any naturally occurring amino acid except Pro or Gly
  VARIANT 720: note = Xaa can be any naturally occurring amino acid
  VARIANT 721: note = Xaa can be any naturally occurring amino acid
  VARIANT 722: note = Xaa can be any naturally occurring amino acid
  VARIANT 724: note = Xaa can be any naturally occurring amino acid except Pro or Gly
  VARIANT 726: note = Xaa can be any naturally occurring amino acid
  VARIANT 727: note = Xaa can be any naturally occurring amino acid
  VARIANT 728: note = Xaa can be any naturally occurring amino acid
  VARIANT 730: note = Xaa can be any naturally occurring amino acid except Pro or Gly
  VARIANT 732: note = Xaa can be any naturally occurring amino acid
  VARIANT 733: note = Xaa can be any naturally occurring amino acid
  VARIANT 734: note = Xaa can be any naturally occurring amino acid
  VARIANT 736: note = Xaa can be any naturally occurring amino acid except Pro or Gly
  VARIANT 738: note = Xaa can be any naturally occurring amino acid
  VARIANT 739: note = Xaa can be any naturally occurring amino acid
  VARIANT 740: note = Xaa can be any naturally occurring amino acid
  VARIANT 742: note = Xaa can be any naturally occurring amino acid except Pro or Gly
  VARIANT 744: note = Xaa can be any naturally occurring amino acid
  VARIANT 745: note = Xaa can be any naturally occurring amino acid
  VARIANT 746: note = Xaa can be any naturally occurring amino acid
  VARIANT 748: note = Xaa can be any naturally occurring amino acid except Pro or Gly
  VARIANT 750: note = Xaa can be any naturally occurring amino acid
  VARIANT 751: note = Xaa can be any naturally occurring amino acid
  VARIANT 752: note = Xaa can be any naturally occurring amino acid
  VARIANT 754: note = Xaa can be any naturally occurring amino acid except Pro or Gly
  VARIANT 756: note = Xaa can be any naturally occurring amino acid
  VARIANT 757: note = Xaa can be any naturally occurring amino acid
  VARIANT 758: note = Xaa can be any naturally occurring amino acid
  VARIANT 760: note = Xaa can be any naturally occurring amino acid except Pro or Gly
  VARIANT 762: note = Xaa can be any naturally occurring amino acid
  VARIANT 763: note = Xaa can be any naturally occurring amino acid
  VARIANT 764: note = Xaa can be any naturally occurring amino acid
  VARIANT 766: note = Xaa can be any naturally occurring amino acid except Pro or Gly
  VARIANT 768: note = Xaa can be any naturally occurring amino acid
  VARIANT 769: note = Xaa can be any naturally occurring amino acid
  VARIANT 770: note = Xaa can be any naturally occurring amino acid
  VARIANT 772: note = Xaa can be any naturally occurring amino acid except Pro or Gly
  VARIANT 774: note = Xaa can be any naturally occurring amino acid
  VARIANT 775: note = Xaa can be any naturally occurring amino acid
  VARIANT 776: note = Xaa can be any naturally occurring amino acid
  VARIANT 778: note = Xaa can be any naturally occurring amino acid except Pro or Gly
  VARIANT 780: note = Xaa can be any naturally occurring amino acid
  VARIANT 781: note = Xaa can be any naturally occurring amino acid
  VARIANT 782: note = Xaa can be any naturally occurring amino acid
  VARIANT 784: note = Xaa can be any naturally occurring amino acid except Pro or Gly
  VARIANT 786: note = Xaa can be any naturally occurring amino acid
  VARIANT 787: note = Xaa can be any naturally occurring amino acid
  VARIANT 788: note = Xaa can be any naturally occurring amino acid
  VARIANT 790: note = Xaa can be any naturally occurring amino acid except Pro or Gly
  VARIANT 792: note = Xaa can be any naturally occurring amino acid
  VARIANT 793: note = Xaa can be any naturally occurring amino acid
  VARIANT 794: note = Xaa can be any naturally occurring amino acid
  VARIANT 796: note = Xaa can be any naturally occurring amino acid except Pro or Gly
  VARIANT 798: note = Xaa can be any naturally occurring amino acid
  VARIANT 799: note = Xaa can be any naturally occurring amino acid
  VARIANT 800: note = Xaa can be any naturally occurring amino acid
  VARIANT 802: note = Xaa can be any naturally occurring amino acid except Pro or Gly
  VARIANT 804: note = Xaa can be any naturally occurring amino acid
  VARIANT 805: note = Xaa can be any naturally occurring amino acid
  VARIANT 806: note = Xaa can be any naturally occurring amino acid
  VARIANT 808: note = Xaa can be any naturally occurring amino acid except Pro or Gly
  VARIANT 810: note = Xaa can be any naturally occurring amino acid
  VARIANT 811: note = Xaa can be any naturally occurring amino acid
  VARIANT 812: note = Xaa can be any naturally occurring amino acid
  VARIANT 814: note = Xaa can be any naturally occurring amino acid except Pro or Gly
  VARIANT 816: note = Xaa can be any naturally occurring amino acid
  VARIANT 817: note = Xaa can be any naturally occurring amino acid
  VARIANT 818: note = Xaa can be any naturally occurring amino acid
  VARIANT 820: note = Xaa can be any naturally occurring amino acid except Pro or Gly
  VARIANT 822: note = Xaa can be any naturally occurring amino acid
  VARIANT 823: note = Xaa can be any naturally occurring amino acid
  VARIANT 824: note = Xaa can be any naturally occurring amino acid
  VARIANT 826: note = Xaa can be any naturally occurring amino acid except Pro or Gly
  VARIANT 828: note = Xaa can be any naturally occurring amino acid
  VARIANT 829: note = Xaa can be any naturally occurring amino acid
  VARIANT 830: note = Xaa can be any naturally occurring amino acid
  VARIANT 832: note = Xaa can be any naturally occurring amino acid except Pro or Gly
  VARIANT 834: note = Xaa can be any naturally occurring amino acid
  VARIANT 835: note = Xaa can be any naturally occurring amino acid
  VARIANT 836: note = Xaa can be any naturally occurring amino acid
  VARIANT 838: note = Xaa can be any naturally occurring amino acid except Pro or Gly
  VARIANT 840: note = Xaa can be any naturally occurring amino acid
  VARIANT 841: note = Xaa can be any naturally occurring amino acid
  VARIANT 842: note = Xaa can be any naturally occurring amino acid
  VARIANT 844: note = Xaa can be any naturally occurring amino acid except Pro or Gly
  VARIANT 846: note = Xaa can be any naturally occurring amino acid
  VARIANT 847: note = Xaa can be any naturally occurring amino acid
  VARIANT 848: note = Xaa can be any naturally occurring amino acid
  VARIANT 850: note = Xaa can be any naturally occurring amino acid except Pro or Gly
  VARIANT 852: note = Xaa can be any naturally occurring amino acid
  VARIANT 853: note = Xaa can be any naturally occurring amino acid
  VARIANT 854: note = Xaa can be any naturally occurring amino acid
  VARIANT 856: note = Xaa can be any naturally occurring amino acid except Pro or Gly
  VARIANT 858: note = Xaa can be any naturally occurring amino acid
  VARIANT 859: note = Xaa can be any naturally occurring amino acid
  VARIANT 860: note = Xaa can be any naturally occurring amino acid
  VARIANT 862: note = Xaa can be any naturally occurring amino acid except Pro or Gly
  VARIANT 864: note = Xaa can be any naturally occurring amino acid
  VARIANT 865: note = Xaa can be any naturally occurring amino acid
  VARIANT 866: note = Xaa can be any naturally occurring amino acid
  VARIANT 868: note = Xaa can be any naturally occurring amino acid except Pro or Gly
  VARIANT 870: note = Xaa can be any naturally occurring amino acid
  VARIANT 871: note = Xaa can be any naturally occurring amino acid
  VARIANT 872: note = Xaa can be any naturally occurring amino acid
  VARIANT 874: note = Xaa can be any naturally occurring amino acid except Pro or Gly
  VARIANT 876: note = Xaa can be any naturally occurring amino acid
  VARIANT 877: note = Xaa can be any naturally occurring amino acid
  VARIANT 878: note = Xaa can be any naturally occurring amino acid
  VARIANT 880: note = Xaa can be any naturally occurring amino acid except Pro or Gly
  VARIANT 882: note = Xaa can be any naturally occurring amino acid
  VARIANT 883: note = Xaa can be any naturally occurring amino acid
  VARIANT 884: note = Xaa can be any naturally occurring amino acid
  VARIANT 886: note = Xaa can be any naturally occurring amino acid except Pro or Gly
  VARIANT 888: note = Xaa can be any naturally occurring amino acid
  VARIANT 889: note = Xaa can be any naturally occurring amino acid
  VARIANT 890: note = Xaa can be any naturally occurring amino acid
  VARIANT 892: note = Xaa can be any naturally occurring amino acid except Pro or Gly
  VARIANT 894: note = Xaa can be any naturally occurring amino acid
  VARIANT 895: note = Xaa can be any naturally occurring amino acid
  VARIANT 896: note = Xaa can be any naturally occurring amino acid
  VARIANT 898: note = Xaa can be any naturally occurring amino acid except Pro or Gly
  VARIANT 900: note = Xaa can be any naturally occurring amino acid
  VARIANT 901: note = Xaa can be any naturally occurring amino acid
  VARIANT 902: note = Xaa can be any naturally occurring amino acid
  VARIANT 904: note = Xaa can be any naturally occurring amino acid except Pro or Gly
  VARIANT 906: note = Xaa can be any naturally occurring amino acid
  VARIANT 907: note = Xaa can be any naturally occurring amino acid
  VARIANT 908: note = Xaa can be any naturally occurring amino acid
  VARIANT 910: note = Xaa can be any naturally occurring amino acid except Pro or Gly
  VARIANT 912: note = Xaa can be any naturally occurring amino acid
  VARIANT 913: note = Xaa can be any naturally occurring amino acid
  VARIANT 914: note = Xaa can be any naturally occurring amino acid
  VARIANT 916: note = Xaa can be any naturally occurring amino acid except Pro or Gly
  VARIANT 918: note = Xaa can be any naturally occurring amino acid
  VARIANT 919: note = Xaa can be any naturally occurring amino acid
  VARIANT 920: note = Xaa can be any naturally occurring amino acid
  VARIANT 922: note = Xaa can be any naturally occurring amino acid except Pro or Gly
  VARIANT 924: note = Xaa can be any naturally occurring amino acid
  VARIANT 925: note = Xaa can be any naturally occurring amino acid
  VARIANT 926: note = Xaa can be any naturally occurring amino acid
  VARIANT 928: note = Xaa can be any naturally occurring amino acid except Pro or Gly
  VARIANT 930: note = Xaa can be any naturally occurring amino acid
  VARIANT 931: note = Xaa can be any naturally occurring amino acid
  VARIANT 932: note = Xaa can be any naturally occurring amino acid
  VARIANT 934: note = Xaa can be any naturally occurring amino acid except Pro or Gly
  VARIANT 936: note = Xaa can be any naturally occurring amino acid
  VARIANT 937: note = Xaa can be any naturally occurring amino acid
  VARIANT 938: note = Xaa can be any naturally occurring amino acid
  VARIANT 940: note = Xaa can be any naturally occurring amino acid except Pro or Gly
  VARIANT 942: note = Xaa can be any naturally occurring amino acid
  VARIANT 943: note = Xaa can be any naturally occurring amino acid
  VARIANT 944: note = Xaa can be any naturally occurring amino acid
  VARIANT 946: note = Xaa can be any naturally occurring amino acid except Pro or Gly
  VARIANT 948: note = Xaa can be any naturally occurring amino acid
  VARIANT 949: note = Xaa can be any naturally occurring amino acid
  VARIANT 950: note = Xaa can be any naturally occurring amino acid
  VARIANT 952: note = Xaa can be any naturally occurring amino acid except Pro or Gly
  VARIANT 954: note = Xaa can be any naturally occurring amino acid
  VARIANT 955: note = Xaa can be any naturally occurring amino acid
  VARIANT 956: note = Xaa can be any naturally occurring amino acid
  VARIANT 958: note = Xaa can be any naturally occurring amino acid except Pro or Gly
  VARIANT 960: note = Xaa can be any naturally occurring amino acid
XXPXGXXXPXGXXXPXGXXXPXGXXXPXGXXXPXGXXXPXGXXXPXGXXXPXGXXXPXGXXXPXGXXXPXGXXXPXGXXXPXGXXXPXGXXXPXGXXXPXGXXXPXGXXXPXGXXXPXGXXXPXGXXXPXGXXXPXGXXXPXGXXXPXGXXXPXGXXXPXGXXXPXGXXXPXGXXXPXGXXXPXGXXXPXGXXXPXGXXXPXGXXXPXGXXXPXGXXXPXGXXXPXGXXXPXGXXXPXGXXXPXGXXXPXGXXXPXGXXXPXGXXXPXGXXXPXGXXXPXGXXXPXGXXXPXGXXXPXGXXXPXGXXXPXGXXXPXGXXXPXGXXXPXGXXXPXGXXXPXGXXXPXGXXXPXGXXXPXGXXXPXGXXXPXGXXXPXGXXXPXGXXXPXGXXXPXGXXXPXGXXXPXGXXXPXGXXXPXGXXXPXGXXXPXGXXXPXGXXXPXGXXXPXGXXXPXGXXXPXGXXXPXGXXXPXGXXXPXGXXXPXGXXXPXGXXXPXGXXXPXGXXXPXGXXXPXGXXXPXGXXXPXGXXXPXGXXXPXGXXXPXGXXXPXGXXXPXGXXXPXGXXXPXGXXXPXGXXXPXGXXXPXGXXXPXGXXXPXGXXXPXGXXXPXGXXXPXGXXXPXGXXXPXGXXXPXGXXXPXGXXXPXGXXXPXGXXXPXGXXXPXGXXXPXGXXXPXGXXXPXGXXXPXGXXXPXGXXXPXGXXXPXGXXXPXGXXXPXGXXXPXGXXXPXGXXXPXGXXXPXGXXXPXGXXXPXGXXXPXGXXXPXGXXXPXGXXXPXGXXXPXGXXXPXGXXXPXGXXXPXGXXXPXGXXXPXGXXXPXGXXXPXGXXXPXGXXXPXGXXXPXGXXXPXGXXXPXGXXXPXGXXXPXGXXXPXGXXXPXGXXXPXGXXXPXGXXXPXGXXXPXGXXXPXGXXXPXGXXXPXGXXXPXGXXXPXGXXXPXGXXXPXGXXXPXGXXXPXGX

SEQ ID NO: 150 - protein, 1120 aa, synthetic construct
  REGION 1..1120: note = elastin-like polypeptide
  VARIANT 1: note = Xaa can be any naturally occurring amino acid
  VARIANT 2: note = Xaa can be any naturally occurring amino acid
  VARIANT 4: note = Xaa can be any naturally occurring amino acid except Pro or Gly
  VARIANT 5: note = Xaa can be any naturally occurring amino acid except Pro or Gly
  VARIANT 7: note = Xaa can be any naturally occurring amino acid
  VARIANT 8: note = Xaa can be any naturally occurring amino acid
  VARIANT 9: note = Xaa can be any naturally occurring amino acid
  VARIANT 11: note = Xaa can be any naturally occurring amino acid except Pro or Gly
  VARIANT 12: note = Xaa can be any naturally occurring amino acid except Pro or Gly
  VARIANT 14: note = Xaa can be any naturally occurring amino acid
  VARIANT 15: note = Xaa can be any naturally occurring amino acid
  VARIANT 16: note = Xaa can be any naturally occurring amino acid
  VARIANT 18: note = Xaa can be any naturally occurring amino acid except Pro or Gly
  VARIANT 19: note = Xaa can be any naturally occurring amino acid except Pro or Gly
  VARIANT 21: note = Xaa can be any naturally occurring amino acid
  VARIANT 22: note = Xaa can be any naturally occurring amino acid
  VARIANT 23: note = Xaa can be any naturally occurring amino acid
  VARIANT 25: note = Xaa can be any naturally occurring amino acid except Pro or Gly
  VARIANT 26: note = Xaa can be any naturally occurring amino acid except Pro or Gly
  VARIANT 28: note = Xaa can be any naturally occurring amino acid
  VARIANT 29: note = Xaa can be any naturally occurring amino acid
  VARIANT 30: note = Xaa can be any naturally occurring amino acid
  VARIANT 32: note = Xaa can be any naturally occurring amino acid except Pro or Gly
  VARIANT 33: note = Xaa can be any naturally occurring amino acid except Pro or Gly
  VARIANT 35: note = Xaa can be any naturally occurring amino acid
  VARIANT 36: note = Xaa can be any naturally occurring amino acid
  VARIANT 37: note = Xaa can be any naturally occurring amino acid
  VARIANT 39: note = Xaa can be any naturally occurring amino acid except Pro or Gly
  VARIANT 40: note = Xaa can be any naturally occurring amino acid except Pro or Gly
  VARIANT 42: note = Xaa can be any naturally occurring amino acid
  VARIANT 43: note = Xaa can be any naturally occurring amino acid
  VARIANT 44: note = Xaa can be any naturally occurring amino acid
  VARIANT 46: note = Xaa can be any naturally occurring amino acid except Pro or Gly
  VARIANT 47: note = Xaa can be any naturally occurring amino acid except Pro or Gly
  VARIANT 49: note = Xaa can be any naturally occurring amino acid
  VARIANT 50: note = Xaa can be any naturally occurring amino acid
  VARIANT 51: note = Xaa can be any naturally occurring amino acid
  VARIANT 53: note = Xaa can be any naturally occurring amino acid except Pro or Gly
  VARIANT 54: note = Xaa can be any naturally occurring amino acid except Pro or Gly
  VARIANT 56: note = Xaa can be any naturally occurring amino acid
  VARIANT 57: note = Xaa can be any naturally occurring amino acid
  VARIANT 58: note = Xaa can be any naturally occurring amino acid
  VARIANT 60: note = Xaa can be any naturally occurring amino acid except Pro or Gly
  VARIANT 61: note = Xaa can be any naturally occurring amino acid except Pro or Gly
  VARIANT 63: note = Xaa can be any naturally occurring amino acid
  VARIANT 64: note = Xaa can be any naturally occurring amino acid
  VARIANT 65: note = Xaa can be any naturally occurring amino acid
  VARIANT 67: note = Xaa can be any naturally occurring amino acid except Pro or Gly
  VARIANT 68: note = Xaa can be any naturally occurring amino acid except Pro or Gly
  VARIANT 70: note = Xaa can be any naturally occurring amino acid
  VARIANT 71..1120: note = May be present or absent in groups of the repeat unit Xaa Xaa ProXaa Xaa Gly Xaa
  VARIANT 71: note = Xaa can be any naturally occurring amino acid
  VARIANT 72: note = Xaa can be any naturally occurring amino acid
  VARIANT 74: note = Xaa can be any naturally occurring amino acid except Pro or Gly
  VARIANT 75: note = Xaa can be any naturally occurring amino acid except Pro or Gly
  VARIANT 77: note = Xaa can be any naturally occurring amino acid
  VARIANT 78: note = Xaa can be any naturally occurring amino acid
  VARIANT 79: note = Xaa can be any naturally occurring amino acid
  VARIANT 81: note = Xaa can be any naturally occurring amino acid except Pro or Gly
  VARIANT 82: note = Xaa can be any naturally occurring amino acid except Pro or Gly
  VARIANT 84: note = Xaa can be any naturally occurring amino acid
  VARIANT 85: note = Xaa can be any naturally occurring amino acid
  VARIANT 86: note = Xaa can be any naturally occurring amino acid
  VARIANT 88: note = Xaa can be any naturally occurring amino acid except Pro or Gly
  VARIANT 89: note = Xaa can be any naturally occurring amino acid except Pro or Gly
  VARIANT 91: note = Xaa can be any naturally occurring amino acid
  VARIANT 92: note = Xaa can be any naturally occurring amino acid
  VARIANT 93: note = Xaa can be any naturally occurring amino acid
  VARIANT 95: note = Xaa can be any naturally occurring amino acid except Pro or Gly
  VARIANT 96: note = Xaa can be any naturally occurring amino acid except Pro or Gly
  VARIANT 98: note = Xaa can be any naturally occurring amino acid
  VARIANT 99: note = Xaa can be any naturally occurring amino acid
  VARIANT 100: note = Xaa can be any naturally occurring amino acid
  VARIANT 102: note = Xaa can be any naturally occurring amino acid except Pro or Gly
  VARIANT 103: note = Xaa can be any naturally occurring amino acid except Pro or Gly
  VARIANT 105: note = Xaa can be any naturally occurring amino acid
  VARIANT 106: note = Xaa can be any naturally occurring amino acid
  VARIANT 107: note = Xaa can be any naturally occurring amino acid
  VARIANT 109: note = Xaa can be any naturally occurring amino acid except Pro or Gly
  VARIANT 110: note = Xaa can be any naturally occurring amino acid except Pro or Gly
  VARIANT 112: note = Xaa can be any naturally occurring amino acid
  VARIANT 113: note = Xaa can be any naturally occurring amino acid
  VARIANT 114: note = Xaa can be any naturally occurring amino acid
  VARIANT 116: note = Xaa can be any naturally occurring amino acid except Pro or Gly
  VARIANT 117: note = Xaa can be any naturally occurring amino acid except Pro or Gly
  VARIANT 119: note = Xaa can be any naturally occurring amino acid
  VARIANT 120: note = Xaa can be any naturally occurring amino acid
  VARIANT 121: note = Xaa can be any naturally occurring amino acid
  VARIANT 123: note = Xaa can be any naturally occurring amino acid except Pro or Gly
  VARIANT 124: note = Xaa can be any naturally occurring amino acid except Pro or Gly
  VARIANT 126: note = Xaa can be any naturally occurring amino acid
  VARIANT 127: note = Xaa can be any naturally occurring amino acid
  VARIANT 128: note = Xaa can be any naturally occurring amino acid
  VARIANT 130: note = Xaa can be any naturally occurring amino acid except Pro or Gly
  VARIANT 131: note = Xaa can be any naturally occurring amino acid except Pro or Gly
  VARIANT 133: note = Xaa can be any naturally occurring amino acid
  VARIANT 134: note = Xaa can be any naturally occurring amino acid
  VARIANT 135: note = Xaa can be any naturally occurring amino acid
  VARIANT 137: note = Xaa can be any naturally occurring amino acid except Pro or Gly
  VARIANT 138: note = Xaa can be any naturally occurring amino acid except Pro or Gly
  VARIANT 140: note = Xaa can be any naturally occurring amino acid
  VARIANT 141: note = Xaa can be any naturally occurring amino acid
  VARIANT 142: note = Xaa can be any naturally occurring amino acid
  VARIANT 144: note = Xaa can be any naturally occurring amino acid except Pro or Gly
  VARIANT 145: note = Xaa can be any naturally occurring amino acid except Pro or Gly
  VARIANT 147: note = Xaa can be any naturally occurring amino acid
  VARIANT 148: note = Xaa can be any naturally occurring amino acid
  VARIANT 149: note = Xaa can be any naturally occurring amino acid
  VARIANT 151: note = Xaa can be any naturally occurring amino acid except Pro or Gly
  VARIANT 152: note = Xaa can be any naturally occurring amino acid except Pro or Gly
  VARIANT 154: note = Xaa can be any naturally occurring amino acid
  VARIANT 155: note = Xaa can be any naturally occurring amino acid
  VARIANT 156: note = Xaa can be any naturally occurring amino acid
  VARIANT 158: note = Xaa can be any naturally occurring amino acid except Pro or Gly
  VARIANT 159: note = Xaa can be any naturally occurring amino acid except Pro or Gly
  VARIANT 161: note = Xaa can be any naturally occurring amino acid
  VARIANT 162: note = Xaa can be any naturally occurring amino acid
  VARIANT 163: note = Xaa can be any naturally occurring amino acid
  VARIANT 165: note = Xaa can be any naturally occurring amino acid except Pro or Gly
  VARIANT 166: note = Xaa can be any naturally occurring amino acid except Pro or Gly
  VARIANT 168: note = Xaa can be any naturally occurring amino acid
  VARIANT 169: note = Xaa can be any naturally occurring amino acid
  VARIANT 170: note = Xaa can be any naturally occurring amino acid
  VARIANT 172: note = Xaa can be any naturally occurring amino acid except Pro or Gly
  VARIANT 173: note = Xaa can be any naturally occurring amino acid except Pro or Gly
  VARIANT 175: note = Xaa can be any naturally occurring amino acid
  VARIANT 176: note = Xaa can be any naturally occurring amino acid
  VARIANT 177: note = Xaa can be any naturally occurring amino acid
  VARIANT 179: note = Xaa can be any naturally occurring amino acid except Pro or Gly
  VARIANT 180: note = Xaa can be any naturally occurring amino acid except Pro or Gly
  VARIANT 182: note = Xaa can be any naturally occurring amino acid
  VARIANT 183: note = Xaa can be any naturally occurring amino acid
  VARIANT 184: note = Xaa can be any naturally occurring amino acid
  VARIANT 186: note = Xaa can be any naturally occurring amino acid except Pro or Gly
  VARIANT 187: note = Xaa can be any naturally occurring amino acid except Pro or Gly
  VARIANT 189: note = Xaa can be any naturally occurring amino acid
  VARIANT 190: note = Xaa can be any naturally occurring amino acid
  VARIANT 191: note = Xaa can be any naturally occurring amino acid
  VARIANT 193: note = Xaa can be any naturally occurring amino acid except Pro or Gly
  VARIANT 194: note = Xaa can be any naturally occurring amino acid except Pro or Gly
  VARIANT 196: note = Xaa can be any naturally occurring amino acid
  VARIANT 197: note = Xaa can be any naturally occurring amino acid
  VARIANT 198: note = Xaa can be any naturally occurring amino acid
  VARIANT 200: note = Xaa can be any naturally occurring amino acid except Pro or Gly
  VARIANT 201: note = Xaa can be any naturally occurring amino acid except Pro or Gly
  VARIANT 203: note = Xaa can be any naturally occurring amino acid
  VARIANT 204: note = Xaa can be any naturally occurring amino acid
  VARIANT 205: note = Xaa can be any naturally occurring amino acid
  VARIANT 207: note = Xaa can be any naturally occurring amino acid except Pro or Gly
  VARIANT 208: note = Xaa can be any naturally occurring amino acid except Pro or Gly
  VARIANT 210: note = Xaa can be any naturally occurring amino acid
  VARIANT 211: note = Xaa can be any naturally occurring amino acid
  VARIANT 212: note = Xaa can be any naturally occurring amino acid
  VARIANT 214: note = Xaa can be any naturally occurring amino acid except Pro or Gly
  VARIANT 215: note = Xaa can be any naturally occurring amino acid except Pro or Gly
  VARIANT 217: note = Xaa can be any naturally occurring amino acid
  VARIANT 218: note = Xaa can be any naturally occurring amino acid
  VARIANT 219: note = Xaa can be any naturally occurring amino acid
  VARIANT 221: note = Xaa can be any naturally occurring amino acid except Pro or Gly
  VARIANT 222: note = Xaa can be any naturally occurring amino acid except Pro or Gly
  VARIANT 224: note = Xaa can be any naturally occurring amino acid
  VARIANT 225: note = Xaa can be any naturally occurring amino acid
  VARIANT 226: note = Xaa can be any naturally occurring amino acid
  VARIANT 228: note = Xaa can be any naturally occurring amino acid except Pro or Gly
  VARIANT 229: note = Xaa can be any naturally occurring amino acid except Pro or Gly
  VARIANT 231: note = Xaa can be any naturally occurring amino acid
  VARIANT 232: note = Xaa can be any naturally occurring amino acid
  VARIANT 233: note = Xaa can be any naturally occurring amino acid
  VARIANT 235: note = Xaa can be any naturally occurring amino acid except Pro or Gly
  VARIANT 236: note = Xaa can be any naturally occurring amino acid except Pro or Gly
  VARIANT 238: note = Xaa can be any naturally occurring amino acid
  VARIANT 239: note = Xaa can be any naturally occurring amino acid
  VARIANT 240: note = Xaa can be any naturally occurring amino acid
  VARIANT 242: note = Xaa can be any naturally occurring amino acid except Pro or Gly
  VARIANT 243: note = Xaa can be any naturally occurring amino acid except Pro or Gly
  VARIANT 245: note = Xaa can be any naturally occurring amino acid
  VARIANT 246: note = Xaa can be any naturally occurring amino acid
  VARIANT 247: note = Xaa can be any naturally occurring amino acid
  VARIANT 249: note = Xaa can be any naturally occurring amino acid except Pro or Gly
  VARIANT 250: note = Xaa can be any naturally occurring amino acid except Pro or Gly
  VARIANT 252: note = Xaa can be any naturally occurring amino acid
  VARIANT 253: note = Xaa can be any naturally occurring amino acid
  VARIANT 254: note = Xaa can be any naturally occurring amino acid
  VARIANT 256: note = Xaa can be any naturally occurring amino acid except Pro or Gly
  VARIANT 257: note = Xaa can be any naturally occurring amino acid except Pro or Gly
  VARIANT 259: note = Xaa can be any naturally occurring amino acid
  VARIANT 260: note = Xaa can be any naturally occurring amino acid
  VARIANT 261: note = Xaa can be any naturally occurring amino acid
  VARIANT 263: note = Xaa can be any naturally occurring amino acid except Pro or Gly
  VARIANT 264: note = Xaa can be any naturally occurring amino acid except Pro or Gly
  VARIANT 266: note = Xaa can be any naturally occurring amino acid
  VARIANT 267: note = Xaa can be any naturally occurring amino acid
  VARIANT 268: note = Xaa can be any naturally occurring amino acid
  VARIANT 270: note = Xaa can be any naturally occurring amino acid except Pro or Gly
  VARIANT 271: note = Xaa can be any naturally occurring amino acid except Pro or Gly
  VARIANT 273: note = Xaa can be any naturally occurring amino acid
  VARIANT 274: note = Xaa can be any naturally occurring amino acid
  VARIANT 275: note = Xaa can be any naturally occurring amino acid
  VARIANT 277: note = Xaa can be any naturally occurring amino acid except Pro or Gly
  VARIANT 278: note = Xaa can be any naturally occurring amino acid except Pro or Gly
  VARIANT 280: note = Xaa can be any naturally occurring amino acid
  VARIANT 281: note = Xaa can be any naturally occurring amino acid
  VARIANT 282: note = Xaa can be any naturally occurring amino acid
  VARIANT 284: note = Xaa can be any naturally occurring amino acid except Pro or Gly
  VARIANT 285: note = Xaa can be any naturally occurring amino acid except Pro or Gly
  VARIANT 287: note = Xaa can be any naturally occurring amino acid
  VARIANT 288: note = Xaa can be any naturally occurring amino acid
  VARIANT 289: note = Xaa can be any naturally occurring amino acid
  VARIANT 291: note = Xaa can be any naturally occurring amino acid except Pro or Gly
  VARIANT 292: note = Xaa can be any naturally occurring amino acid except Pro or Gly
  VARIANT 294: note = Xaa can be any naturally occurring amino acid
  VARIANT 295: note = Xaa can be any naturally occurring amino acid
  VARIANT 296: note = Xaa can be any naturally occurring amino acid
  VARIANT 298: note = Xaa can be any naturally occurring amino acid except Pro or Gly
  VARIANT 299: note = Xaa can be any naturally occurring amino acid except Pro or Gly
  VARIANT 301: note = Xaa can be any naturally occurring amino acid
  VARIANT 302: note = Xaa can be any naturally occurring amino acid
  VARIANT 303: note = Xaa can be any naturally occurring amino acid
  VARIANT 305: note = Xaa can be any naturally occurring amino acid except Pro or Gly
  VARIANT 306: note = Xaa can be any naturally occurring amino acid except Pro or Gly
  VARIANT 308: note = Xaa can be any naturally occurring amino acid
  VARIANT 309: note = Xaa can be any naturally occurring amino acid
  VARIANT 310: note = Xaa can be any naturally occurring amino acid
  VARIANT 312: note = Xaa can be any naturally occurring amino acid except Pro or Gly
  VARIANT 313: note = Xaa can be any naturally occurring amino acid except Pro or Gly
  VARIANT 315: note = Xaa can be any naturally occurring amino acid
  VARIANT 316: note = Xaa can be any naturally occurring amino acid
  VARIANT 317: note = Xaa can be any naturally occurring amino acid
  VARIANT 319: note = Xaa can be any naturally occurring amino acid except Pro or Gly
  VARIANT 320: note = Xaa can be any naturally occurring amino acid except Pro or Gly
  VARIANT 322: note = Xaa can be any naturally occurring amino acid
  VARIANT 323: note = Xaa can be any naturally occurring amino acid
  VARIANT 324: note = Xaa can be any naturally occurring amino acid
  VARIANT 326: note = Xaa can be any naturally occurring amino acid except Pro or Gly
  VARIANT 327: note = Xaa can be any naturally occurring amino acid except Pro or Gly
  VARIANT 329: note = Xaa can be any naturally occurring amino acid
  VARIANT 330: note = Xaa can be any naturally occurring amino acid
  VARIANT 331: note = Xaa can be any naturally occurring amino acid
  VARIANT 333: note = Xaa can be any naturally occurring amino acid except Pro or Gly
  VARIANT 334: note = Xaa can be any naturally occurring amino acid except Pro or Gly
  VARIANT 336: note = Xaa can be any naturally occurring amino acid
  VARIANT 337: note = Xaa can be any naturally occurring amino acid
  VARIANT 338: note = Xaa can be any naturally occurring amino acid
  VARIANT 340: note = Xaa can be any naturally occurring amino acid except Pro or Gly
  VARIANT 341: note = Xaa can be any naturally occurring amino acid except Pro or Gly
  VARIANT 343: note = Xaa can be any naturally occurring amino acid
  VARIANT 344: note = Xaa can be any naturally occurring amino acid
  VARIANT 345: note = Xaa can be any naturally occurring amino acid
  VARIANT 347: note = Xaa can be any naturally occurring amino acid except Pro or Gly
  VARIANT 348: note = Xaa can be any naturally occurring amino acid except Pro or Gly
  VARIANT 350: note = Xaa can be any naturally occurring amino acid
  VARIANT 351: note = Xaa can be any naturally occurring amino acid
  VARIANT 352: note = Xaa can be any naturally occurring amino acid
  VARIANT 354: note = Xaa can be any naturally occurring amino acid except Pro or Gly
  VARIANT 355: note = Xaa can be any naturally occurring amino acid except Pro or Gly
  VARIANT 357: note = Xaa can be any naturally occurring amino acid
  VARIANT 358: note = Xaa can be any naturally occurring amino acid
  VARIANT 359: note = Xaa can be any naturally occurring amino acid
  VARIANT 361: note = Xaa can be any naturally occurring amino acid except Pro or Gly
  VARIANT 362: note = Xaa can be any naturally occurring amino acid except Pro or Gly
  VARIANT 364: note = Xaa can be any naturally occurring amino acid
  VARIANT 365: note = Xaa can be any naturally occurring amino acid
  VARIANT 366: note = Xaa can be any naturally occurring amino acid
  VARIANT 368: note = Xaa can be any naturally occurring amino acid except Pro or Gly
  VARIANT 369: note = Xaa can be any naturally occurring amino acid except Pro or Gly
  VARIANT 371: note = Xaa can be any naturally occurring amino acid
  VARIANT 372: note = Xaa can be any naturally occurring amino acid
  VARIANT 373: note = Xaa can be any naturally occurring amino acid
  VARIANT 375: note = Xaa can be any naturally occurring amino acid except Pro or Gly
  VARIANT 376: note = Xaa can be any naturally occurring amino acid except Pro or Gly
  VARIANT 378: note = Xaa can be any naturally occurring amino acid
  VARIANT 379: note = Xaa can be any naturally occurring amino acid
  VARIANT 380: note = Xaa can be any naturally occurring amino acid
  VARIANT 382: note = Xaa can be any naturally occurring amino acid except Pro or Gly
  VARIANT 383: note = Xaa can be any naturally occurring amino acid except Pro or Gly
  VARIANT 385: note = Xaa can be any naturally occurring amino acid
  VARIANT 386: note = Xaa can be any naturally occurring amino acid
  VARIANT 387: note = Xaa can be any naturally occurring amino acid
  VARIANT 389: note = Xaa can be any naturally occurring amino acid except Pro or Gly
  VARIANT 390: note = Xaa can be any naturally occurring amino acid except Pro or Gly
  VARIANT 392: note = Xaa can be any naturally occurring amino acid
  VARIANT 393: note = Xaa can be any naturally occurring amino acid
  VARIANT 394: note = Xaa can be any naturally occurring amino acid
  VARIANT 396: note = Xaa can be any naturally occurring amino acid except Pro or Gly
  VARIANT 397: note = Xaa can be any naturally occurring amino acid except Pro or Gly
  VARIANT 399: note = Xaa can be any naturally occurring amino acid
  VARIANT 400: note = Xaa can be any naturally occurring amino acid
  VARIANT 401: note = Xaa can be any naturally occurring amino acid
  VARIANT 403: note = Xaa can be any naturally occurring amino acid except Pro or Gly
  VARIANT 404: note = Xaa can be any naturally occurring amino acid except Pro or Gly
  VARIANT 406: note = Xaa can be any naturally occurring amino acid
  VARIANT 407: note = Xaa can be any naturally occurring amino acid
  VARIANT 408: note = Xaa can be any naturally occurring amino acid
  VARIANT 410: note = Xaa can be any naturally occurring amino acid except Pro or Gly
  VARIANT 411: note = Xaa can be any naturally occurring amino acid except Pro or Gly
  VARIANT 413: note = Xaa can be any naturally occurring amino acid
  VARIANT 414: note = Xaa can be any naturally occurring amino acid
  VARIANT 415: note = Xaa can be any naturally occurring amino acid
  VARIANT 417: note = Xaa can be any naturally occurring amino acid except Pro or Gly
  VARIANT 418: note = Xaa can be any naturally occurring amino acid except Pro or Gly
  VARIANT 420: note = Xaa can be any naturally occurring amino acid
  VARIANT 421: note = Xaa can be any naturally occurring amino acid
  VARIANT 422: note = Xaa can be any naturally occurring amino acid
  VARIANT 424: note = Xaa can be any naturally occurring amino acid except Pro or Gly
  VARIANT 425: note = Xaa can be any naturally occurring amino acid except Pro or Gly
  VARIANT 427: note = Xaa can be any naturally occurring amino acid
  VARIANT 428: note = Xaa can be any naturally occurring amino acid
  VARIANT 429: note = Xaa can be any naturally occurring amino acid
  VARIANT 431: note = Xaa can be any naturally occurring amino acid except Pro or Gly
  VARIANT 432: note = Xaa can be any naturally occurring amino acid except Pro or Gly
  VARIANT 434: note = Xaa can be any naturally occurring amino acid
  VARIANT 435: note = Xaa can be any naturally occurring amino acid
  VARIANT 436: note = Xaa can be any naturally occurring amino acid
  VARIANT 438: note = Xaa can be any naturally occurring amino acid except Pro or Gly
  VARIANT 439: note = Xaa can be any naturally occurring amino acid except Pro or Gly
  VARIANT 441: note = Xaa can be any naturally occurring amino acid
  VARIANT 442: note = Xaa can be any naturally occurring amino acid
  VARIANT 443: note = Xaa can be any naturally occurring amino acid
  VARIANT 445: note = Xaa can be any naturally occurring amino acid except Pro or Gly
  VARIANT 446: note = Xaa can be any naturally occurring amino acid except Pro or Gly
  VARIANT 448: note = Xaa can be any naturally occurring amino acid
  VARIANT 449: note = Xaa can be any naturally occurring amino acid
  VARIANT 450: note = Xaa can be any naturally occurring amino acid
  VARIANT 452: note = Xaa can be any naturally occurring amino acid except Pro or Gly
  VARIANT 453: note = Xaa can be any naturally occurring amino acid except Pro or Gly
  VARIANT 455: note = Xaa can be any naturally occurring amino acid
  VARIANT 456: note = Xaa can be any naturally occurring amino acid
  VARIANT 457: note = Xaa can be any naturally occurring amino acid
  VARIANT 459: note = Xaa can be any naturally occurring amino acid except Pro or Gly
  VARIANT 460: note = Xaa can be any naturally occurring amino acid except Pro or Gly
  VARIANT 462: note = Xaa can be any naturally occurring amino acid
  VARIANT 463: note = Xaa can be any naturally occurring amino acid
  VARIANT 464: note = Xaa can be any naturally occurring amino acid
  VARIANT 466: note = Xaa can be any naturally occurring amino acid except Pro or Gly
  VARIANT 467: note = Xaa can be any naturally occurring amino acid except Pro or Gly
  VARIANT 469: note = Xaa can be any naturally occurring amino acid
  VARIANT 470: note = Xaa can be any naturally occurring amino acid
  VARIANT 471: note = Xaa can be any naturally occurring amino acid
  VARIANT 473: note = Xaa can be any naturally occurring amino acid except Pro or Gly
  VARIANT 474: note = Xaa can be any naturally occurring amino acid except Pro or Gly
  VARIANT 476: note = Xaa can be any naturally occurring amino acid
  VARIANT 477: note = Xaa can be any naturally occurring amino acid
  VARIANT 478: note = Xaa can be any naturally occurring amino acid
  VARIANT 480: note = Xaa can be any naturally occurring amino acid except Pro or Gly
  VARIANT 481: note = Xaa can be any naturally occurring amino acid except Pro or Gly
  VARIANT 483: note = Xaa can be any naturally occurring amino acid
  VARIANT 484: note = Xaa can be any naturally occurring amino acid
  VARIANT 485: note = Xaa can be any naturally occurring amino acid
  VARIANT 487: note = Xaa can be any naturally occurring amino acid except Pro or Gly
  VARIANT 488: note = Xaa can be any naturally occurring amino acid except Pro or Gly
  VARIANT 490: note = Xaa can be any naturally occurring amino acid
  VARIANT 491: note = Xaa can be any naturally occurring amino acid
  VARIANT 492: note = Xaa can be any naturally occurring amino acid
  VARIANT 494: note = Xaa can be any naturally occurring amino acid except Pro or Gly
  VARIANT 495: note = Xaa can be any naturally occurring amino acid except Pro or Gly
  VARIANT 497: note = Xaa can be any naturally occurring amino acid
  VARIANT 498: note = Xaa can be any naturally occurring amino acid
  VARIANT 499: note = Xaa can be any naturally occurring amino acid
  VARIANT 501: note = Xaa can be any naturally occurring amino acid except Pro or Gly
  VARIANT 502: note = Xaa can be any naturally occurring amino acid except Pro or Gly
  VARIANT 504: note = Xaa can be any naturally occurring amino acid
  VARIANT 505: note = Xaa can be any naturally occurring amino acid
  VARIANT 506: note = Xaa can be any naturally occurring amino acid
  VARIANT 508: note = Xaa can be any naturally occurring amino acid except Pro or Gly
  VARIANT 509: note = Xaa can be any naturally occurring amino acid except Pro or Gly
  VARIANT 511: note = Xaa can be any naturally occurring amino acid
  VARIANT 512: note = Xaa can be any naturally occurring amino acid
  VARIANT 513: note = Xaa can be any naturally occurring amino acid
  VARIANT 515: note = Xaa can be any naturally occurring amino acid except Pro or Gly
  VARIANT 516: note = Xaa can be any naturally occurring amino acid except Pro or Gly
  VARIANT 518: note = Xaa can be any naturally occurring amino acid
  VARIANT 519: note = Xaa can be any naturally occurring amino acid
  VARIANT 520: note = Xaa can be any naturally occurring amino acid
  VARIANT 522: note = Xaa can be any naturally occurring amino acid except Pro or Gly
  VARIANT 523: note = Xaa can be any naturally occurring amino acid except Pro or Gly
  VARIANT 525: note = Xaa can be any naturally occurring amino acid
  VARIANT 526: note = Xaa can be any naturally occurring amino acid
  VARIANT 527: note = Xaa can be any naturally occurring amino acid
  VARIANT 529: note = Xaa can be any naturally occurring amino acid except Pro or Gly
  VARIANT 530: note = Xaa can be any naturally occurring amino acid except Pro or Gly
  VARIANT 532: note = Xaa can be any naturally occurring amino acid
  VARIANT 533: note = Xaa can be any naturally occurring amino acid
  VARIANT 534: note = Xaa can be any naturally occurring amino acid
  VARIANT 536: note = Xaa can be any naturally occurring amino acid except Pro or Gly
  VARIANT 537: note = Xaa can be any naturally occurring amino acid except Pro or Gly
  VARIANT 539: note = Xaa can be any naturally occurring amino acid
  VARIANT 540: note = Xaa can be any naturally occurring amino acid
  VARIANT 541: note = Xaa can be any naturally occurring amino acid
  VARIANT 543: note = Xaa can be any naturally occurring amino acid except Pro or Gly
  VARIANT 544: note = Xaa can be any naturally occurring amino acid except Pro or Gly
  VARIANT 546: note = Xaa can be any naturally occurring amino acid
  VARIANT 547: note = Xaa can be any naturally occurring amino acid
  VARIANT 548: note = Xaa can be any naturally occurring amino acid
  VARIANT 550: note = Xaa can be any naturally occurring amino acid except Pro or Gly
  VARIANT 551: note = Xaa can be any naturally occurring amino acid except Pro or Gly
  VARIANT 553: note = Xaa can be any naturally occurring amino acid
  VARIANT 554: note = Xaa can be any naturally occurring amino acid
  VARIANT 555: note = Xaa can be any naturally occurring amino acid
  VARIANT 557: note = Xaa can be any naturally occurring amino acid except Pro or Gly
  VARIANT 558: note = Xaa can be any naturally occurring amino acid except Pro or Gly
  VARIANT 560: note = Xaa can be any naturally occurring amino acid
  VARIANT 561: note = Xaa can be any naturally occurring amino acid
  VARIANT 562: note = Xaa can be any naturally occurring amino acid
  VARIANT 564: note = Xaa can be any naturally occurring amino acid except Pro or Gly
  VARIANT 565: note = Xaa can be any naturally occurring amino acid except Pro or Gly
  VARIANT 567: note = Xaa can be any naturally occurring amino acid
  VARIANT 568: note = Xaa can be any naturally occurring amino acid
  VARIANT 569: note = Xaa can be any naturally occurring amino acid
  VARIANT 571: note = Xaa can be any naturally occurring amino acid except Pro or Gly
  VARIANT 572: note = Xaa can be any naturally occurring amino acid except Pro or Gly
  VARIANT 574: note = Xaa can be any naturally occurring amino acid
  VARIANT 575: note = Xaa can be any naturally occurring amino acid
  VARIANT 576: note = Xaa can be any naturally occurring amino acid
  VARIANT 578: note = Xaa can be any naturally occurring amino acid except Pro or Gly
  VARIANT 579: note = Xaa can be any naturally occurring amino acid except Pro or Gly
  VARIANT 581: note = Xaa can be any naturally occurring amino acid
  VARIANT 582: note = Xaa can be any naturally occurring amino acid
  VARIANT 583: note = Xaa can be any naturally occurring amino acid
  VARIANT 585: note = Xaa can be any naturally occurring amino acid except Pro or Gly
  VARIANT 586: note = Xaa can be any naturally occurring amino acid except Pro or Gly
  VARIANT 588: note = Xaa can be any naturally occurring amino acid
  VARIANT 589: note = Xaa can be any naturally occurring amino acid
  VARIANT 590: note = Xaa can be any naturally occurring amino acid
  VARIANT 592: note = Xaa can be any naturally occurring amino acid except Pro or Gly
  VARIANT 593: note = Xaa can be any naturally occurring amino acid except Pro or Gly
  VARIANT 595: note = Xaa can be any naturally occurring amino acid
  VARIANT 596: note = Xaa can be any naturally occurring amino acid
  VARIANT 597: note = Xaa can be any naturally occurring amino acid
  VARIANT 599: note = Xaa can be any naturally occurring amino acid except Pro or Gly
  VARIANT 600: note = Xaa can be any naturally occurring amino acid except Pro or Gly
  VARIANT 602: note = Xaa can be any naturally occurring amino acid
  VARIANT 603: note = Xaa can be any naturally occurring amino acid
  VARIANT 604: note = Xaa can be any naturally occurring amino acid
  VARIANT 606: note = Xaa can be any naturally occurring amino acid except Pro or Gly
  VARIANT 607: note = Xaa can be any naturally occurring amino acid except Pro or Gly
  VARIANT 609: note = Xaa can be any naturally occurring amino acid
  VARIANT 610: note = Xaa can be any naturally occurring amino acid
  VARIANT 611: note = Xaa can be any naturally occurring amino acid
  VARIANT 613: note = Xaa can be any naturally occurring amino acid except Pro or Gly
  VARIANT 614: note = Xaa can be any naturally occurring amino acid except Pro or Gly
  VARIANT 616: note = Xaa can be any naturally occurring amino acid
  VARIANT 617: note = Xaa can be any naturally occurring amino acid
  VARIANT 618: note = Xaa can be any naturally occurring amino acid
  VARIANT 620: note = Xaa can be any naturally occurring amino acid except Pro or Gly
  VARIANT 621: note = Xaa can be any naturally occurring amino acid except Pro or Gly
  VARIANT 623: note = Xaa can be any naturally occurring amino acid
  VARIANT 624: note = Xaa can be any naturally occurring amino acid
  VARIANT 625: note = Xaa can be any naturally occurring amino acid
  VARIANT 627: note = Xaa can be any naturally occurring amino acid except Pro or Gly
  VARIANT 628: note = Xaa can be any naturally occurring amino acid except Pro or Gly
  VARIANT 630: note = Xaa can be any naturally occurring amino acid
  VARIANT 631: note = Xaa can be any naturally occurring amino acid
  VARIANT 632: note = Xaa can be any naturally occurring amino acid
  VARIANT 634: note = Xaa can be any naturally occurring amino acid except Pro or Gly
  VARIANT 635: note = Xaa can be any naturally occurring amino acid except Pro or Gly
  VARIANT 637: note = Xaa can be any naturally occurring amino acid
  VARIANT 638: note = Xaa can be any naturally occurring amino acid
  VARIANT 639: note = Xaa can be any naturally occurring amino acid
  VARIANT 641: note = Xaa can be any naturally occurring amino acid except Pro or Gly
  VARIANT 642: note = Xaa can be any naturally occurring amino acid except Pro or Gly
  VARIANT 644: note = Xaa can be any naturally occurring amino acid
  VARIANT 645: note = Xaa can be any naturally occurring amino acid
  VARIANT 646: note = Xaa can be any naturally occurring amino acid
  VARIANT 648: note = Xaa can be any naturally occurring amino acid except Pro or Gly
  VARIANT 649: note = Xaa can be any naturally occurring amino acid except Pro or Gly
  VARIANT 651: note = Xaa can be any naturally occurring amino acid
  VARIANT 652: note = Xaa can be any naturally occurring amino acid
  VARIANT 653: note = Xaa can be any naturally occurring amino acid
  VARIANT 655: note = Xaa can be any naturally occurring amino acid except Pro or Gly
  VARIANT 656: note = Xaa can be any naturally occurring amino acid except Pro or Gly
  VARIANT 658: note = Xaa can be any naturally occurring amino acid
  VARIANT 659: note = Xaa can be any naturally occurring amino acid
  VARIANT 660: note = Xaa can be any naturally occurring amino acid
  VARIANT 662: note = Xaa can be any naturally occurring amino acid except Pro or Gly
  VARIANT 663: note = Xaa can be any naturally occurring amino acid except Pro or Gly
  VARIANT 665: note = Xaa can be any naturally occurring amino acid
  VARIANT 666: note = Xaa can be any naturally occurring amino acid
  VARIANT 667: note = Xaa can be any naturally occurring amino acid
  VARIANT 669: note = Xaa can be any naturally occurring amino acid except Pro or Gly
  VARIANT 670: note = Xaa can be any naturally occurring amino acid except Pro or Gly
  VARIANT 672: note = Xaa can be any naturally occurring amino acid
  VARIANT 673: note = Xaa can be any naturally occurring amino acid
  VARIANT 674: note = Xaa can be any naturally occurring amino acid
  VARIANT 676: note = Xaa can be any naturally occurring amino acid except Pro or Gly
  VARIANT 677: note = Xaa can be any naturally occurring amino acid except Pro or Gly
  VARIANT 679: note = Xaa can be any naturally occurring amino acid
  VARIANT 680: note = Xaa can be any naturally occurring amino acid
  VARIANT 681: note = Xaa can be any naturally occurring amino acid
  VARIANT 683: note = Xaa can be any naturally occurring amino acid except Pro or Gly
  VARIANT 684: note = Xaa can be any naturally occurring amino acid except Pro or Gly
  VARIANT 686: note = Xaa can be any naturally occurring amino acid
  VARIANT 687: note = Xaa can be any naturally occurring amino acid
  VARIANT 688: note = Xaa can be any naturally occurring amino acid
  VARIANT 690: note = Xaa can be any naturally occurring amino acid except Pro or Gly
  VARIANT 691: note = Xaa can be any naturally occurring amino acid except Pro or Gly
  VARIANT 693: note = Xaa can be any naturally occurring amino acid
  VARIANT 694: note = Xaa can be any naturally occurring amino acid
  VARIANT 695: note = Xaa can be any naturally occurring amino acid
  VARIANT 697: note = Xaa can be any naturally occurring amino acid except Pro or Gly
  VARIANT 698: note = Xaa can be any naturally occurring amino acid except Pro or Gly
  VARIANT 700: note = Xaa can be any naturally occurring amino acid
  VARIANT 701: note = Xaa can be any naturally occurring amino acid
  VARIANT 702: note = Xaa can be any naturally occurring amino acid
  VARIANT 704: note = Xaa can be any naturally occurring amino acid except Pro or Gly
  VARIANT 705: note = Xaa can be any naturally occurring amino acid except Pro or Gly
  VARIANT 707: note = Xaa can be any naturally occurring amino acid
  VARIANT 708: note = Xaa can be any naturally occurring amino acid
  VARIANT 709: note = Xaa can be any naturally occurring amino acid
  VARIANT 711: note = Xaa can be any naturally occurring amino acid except Pro or Gly
  VARIANT 712: note = Xaa can be any naturally occurring amino acid except Pro or Gly
  VARIANT 714: note = Xaa can be any naturally occurring amino acid
  VARIANT 715: note = Xaa can be any naturally occurring amino acid
  VARIANT 716: note = Xaa can be any naturally occurring amino acid
  VARIANT 718: note = Xaa can be any naturally occurring amino acid except Pro or Gly
  VARIANT 719: note = Xaa can be any naturally occurring amino acid except Pro or Gly
  VARIANT 721: note = Xaa can be any naturally occurring amino acid
  VARIANT 722: note = Xaa can be any naturally occurring amino acid
  VARIANT 723: note = Xaa can be any naturally occurring amino acid
  VARIANT 725: note = Xaa can be any naturally occurring amino acid except Pro or Gly
  VARIANT 726: note = Xaa can be any naturally occurring amino acid except Pro or Gly
  VARIANT 728: note = Xaa can be any naturally occurring amino acid
  VARIANT 729: note = Xaa can be any naturally occurring amino acid
  VARIANT 730: note = Xaa can be any naturally occurring amino acid
  VARIANT 732: note = Xaa can be any naturally occurring amino acid except Pro or Gly
  VARIANT 733: note = Xaa can be any naturally occurring amino acid except Pro or Gly
  VARIANT 735: note = Xaa can be any naturally occurring amino acid
  VARIANT 736: note = Xaa can be any naturally occurring amino acid
  VARIANT 737: note = Xaa can be any naturally occurring amino acid
  VARIANT 739: note = Xaa can be any naturally occurring amino acid except Pro or Gly
  VARIANT 740: note = Xaa can be any naturally occurring amino acid except Pro or Gly
  VARIANT 742: note = Xaa can be any naturally occurring amino acid
  VARIANT 743: note = Xaa can be any naturally occurring amino acid
  VARIANT 744: note = Xaa can be any naturally occurring amino acid
  VARIANT 746: note = Xaa can be any naturally occurring amino acid except Pro or Gly
  VARIANT 747: note = Xaa can be any naturally occurring amino acid except Pro or Gly
  VARIANT 749: note = Xaa can be any naturally occurring amino acid
  VARIANT 750: note = Xaa can be any naturally occurring amino acid
  VARIANT 751: note = Xaa can be any naturally occurring amino acid
  VARIANT 753: note = Xaa can be any naturally occurring amino acid except Pro or Gly
  VARIANT 754: note = Xaa can be any naturally occurring amino acid except Pro or Gly
  VARIANT 756: note = Xaa can be any naturally occurring amino acid
  VARIANT 757: note = Xaa can be any naturally occurring amino acid
  VARIANT 758: note = Xaa can be any naturally occurring amino acid
  VARIANT 760: note = Xaa can be any naturally occurring amino acid except Pro or Gly
  VARIANT 761: note = Xaa can be any naturally occurring amino acid except Pro or Gly
  VARIANT 763: note = Xaa can be any naturally occurring amino acid
  VARIANT 764: note = Xaa can be any naturally occurring amino acid
  VARIANT 765: note = Xaa can be any naturally occurring amino acid
  VARIANT 767: note = Xaa can be any naturally occurring amino acid except Pro or Gly
  VARIANT 768: note = Xaa can be any naturally occurring amino acid except Pro or Gly
  VARIANT 770: note = Xaa can be any naturally occurring amino acid
  VARIANT 771: note = Xaa can be any naturally occurring amino acid
  VARIANT 772: note = Xaa can be any naturally occurring amino acid
  VARIANT 774: note = Xaa can be any naturally occurring amino acid except Pro or Gly
  VARIANT 775: note = Xaa can be any naturally occurring amino acid except Pro or Gly
  VARIANT 777: note = Xaa can be any naturally occurring amino acid
  VARIANT 778: note = Xaa can be any naturally occurring amino acid
  VARIANT 779: note = Xaa can be any naturally occurring amino acid
  VARIANT 781: note = Xaa can be any naturally occurring amino acid except Pro or Gly
  VARIANT 782: note = Xaa can be any naturally occurring amino acid except Pro or Gly
  VARIANT 784: note = Xaa can be any naturally occurring amino acid
  VARIANT 785: note = Xaa can be any naturally occurring amino acid
  VARIANT 786: note = Xaa can be any naturally occurring amino acid
  VARIANT 788: note = Xaa can be any naturally occurring amino acid except Pro or Gly
  VARIANT 789: note = Xaa can be any naturally occurring amino acid except Pro or Gly
  VARIANT 791: note = Xaa can be any naturally occurring amino acid
  VARIANT 792: note = Xaa can be any naturally occurring amino acid
  VARIANT 793: note = Xaa can be any naturally occurring amino acid
  VARIANT 795: note = Xaa can be any naturally occurring amino acid except Pro or Gly
  VARIANT 796: note = Xaa can be any naturally occurring amino acid except Pro or Gly
  VARIANT 798: note = Xaa can be any naturally occurring amino acid
  VARIANT 799: note = Xaa can be any naturally occurring amino acid
  VARIANT 800: note = Xaa can be any naturally occurring amino acid
  VARIANT 802: note = Xaa can be any naturally occurring amino acid except Pro or Gly
  VARIANT 803: note = Xaa can be any naturally occurring amino acid except Pro or Gly
  VARIANT 805: note = Xaa can be any naturally occurring amino acid
  VARIANT 806: note = Xaa can be any naturally occurring amino acid
  VARIANT 807: note = Xaa can be any naturally occurring amino acid
  VARIANT 809: note = Xaa can be any naturally occurring amino acid except Pro or Gly
  VARIANT 810: note = Xaa can be any naturally occurring amino acid except Pro or Gly
  VARIANT 812: note = Xaa can be any naturally occurring amino acid
  VARIANT 813: note = Xaa can be any naturally occurring amino acid
  VARIANT 814: note = Xaa can be any naturally occurring amino acid
  VARIANT 816: note = Xaa can be any naturally occurring amino acid except Pro or Gly
  VARIANT 817: note = Xaa can be any naturally occurring amino acid except Pro or Gly
  VARIANT 819: note = Xaa can be any naturally occurring amino acid
  VARIANT 820: note = Xaa can be any naturally occurring amino acid
  VARIANT 821: note = Xaa can be any naturally occurring amino acid
  VARIANT 823: note = Xaa can be any naturally occurring amino acid except Pro or Gly
  VARIANT 824: note = Xaa can be any naturally occurring amino acid except Pro or Gly
  VARIANT 826: note = Xaa can be any naturally occurring amino acid
  VARIANT 827: note = Xaa can be any naturally occurring amino acid
  VARIANT 828: note = Xaa can be any naturally occurring amino acid
  VARIANT 830: note = Xaa can be any naturally occurring amino acid except Pro or Gly
  VARIANT 831: note = Xaa can be any naturally occurring amino acid except Pro or Gly
  VARIANT 833: note = Xaa can be any naturally occurring amino acid
  VARIANT 834: note = Xaa can be any naturally occurring amino acid
  VARIANT 835: note = Xaa can be any naturally occurring amino acid
  VARIANT 837: note = Xaa can be any naturally occurring amino acid except Pro or Gly
  VARIANT 838: note = Xaa can be any naturally occurring amino acid except Pro or Gly
  VARIANT 840: note = Xaa can be any naturally occurring amino acid
  VARIANT 841: note = Xaa can be any naturally occurring amino acid
  VARIANT 842: note = Xaa can be any naturally occurring amino acid
  VARIANT 844: note = Xaa can be any naturally occurring amino acid except Pro or Gly
  VARIANT 845: note = Xaa can be any naturally occurring amino acid except Pro or Gly
  VARIANT 847: note = Xaa can be any naturally occurring amino acid
  VARIANT 848: note = Xaa can be any naturally occurring amino acid
  VARIANT 849: note = Xaa can be any naturally occurring amino acid
  VARIANT 851: note = Xaa can be any naturally occurring amino acid except Pro or Gly
  VARIANT 852: note = Xaa can be any naturally occurring amino acid except Pro or Gly
  VARIANT 854: note = Xaa can be any naturally occurring amino acid
  VARIANT 855: note = Xaa can be any naturally occurring amino acid
  VARIANT 856: note = Xaa can be any naturally occurring amino acid
  VARIANT 858: note = Xaa can be any naturally occurring amino acid except Pro or Gly
  VARIANT 859: note = Xaa can be any naturally occurring amino acid except Pro or Gly
  VARIANT 861: note = Xaa can be any naturally occurring amino acid
  VARIANT 862: note = Xaa can be any naturally occurring amino acid
  VARIANT 863: note = Xaa can be any naturally occurring amino acid
  VARIANT 865: note = Xaa can be any naturally occurring amino acid except Pro or Gly
  VARIANT 866: note = Xaa can be any naturally occurring amino acid except Pro or Gly
  VARIANT 868: note = Xaa can be any naturally occurring amino acid
  VARIANT 869: note = Xaa can be any naturally occurring amino acid
  VARIANT 870: note = Xaa can be any naturally occurring amino acid
  VARIANT 872: note = Xaa can be any naturally occurring amino acid except Pro or Gly
  VARIANT 873: note = Xaa can be any naturally occurring amino acid except Pro or Gly
  VARIANT 875: note = Xaa can be any naturally occurring amino acid
  VARIANT 876: note = Xaa can be any naturally occurring amino acid
  VARIANT 877: note = Xaa can be any naturally occurring amino acid
  VARIANT 879: note = Xaa can be any naturally occurring amino acid except Pro or Gly
  VARIANT 880: note = Xaa can be any naturally occurring amino acid except Pro or Gly
  VARIANT 882: note = Xaa can be any naturally occurring amino acid
  VARIANT 883: note = Xaa can be any naturally occurring amino acid
  VARIANT 884: note = Xaa can be any naturally occurring amino acid
  VARIANT 886: note = Xaa can be any naturally occurring amino acid except Pro or Gly
  VARIANT 887: note = Xaa can be any naturally occurring amino acid except Pro or Gly
  VARIANT 889: note = Xaa can be any naturally occurring amino acid
  VARIANT 890: note = Xaa can be any naturally occurring amino acid
  VARIANT 891: note = Xaa can be any naturally occurring amino acid
  VARIANT 893: note = Xaa can be any naturally occurring amino acid except Pro or Gly
  VARIANT 894: note = Xaa can be any naturally occurring amino acid except Pro or Gly
  VARIANT 896: note = Xaa can be any naturally occurring amino acid
  VARIANT 897: note = Xaa can be any naturally occurring amino acid
  VARIANT 898: note = Xaa can be any naturally occurring amino acid
  VARIANT 900: note = Xaa can be any naturally occurring amino acid except Pro or Gly
  VARIANT 901: note = Xaa can be any naturally occurring amino acid except Pro or Gly
  VARIANT 903: note = Xaa can be any naturally occurring amino acid
  VARIANT 904: note = Xaa can be any naturally occurring amino acid
  VARIANT 905: note = Xaa can be any naturally occurring amino acid
  VARIANT 907: note = Xaa can be any naturally occurring amino acid except Pro or Gly
  VARIANT 908: note = Xaa can be any naturally occurring amino acid except Pro or Gly
  VARIANT 910: note = Xaa can be any naturally occurring amino acid
  VARIANT 911: note = Xaa can be any naturally occurring amino acid
  VARIANT 912: note = Xaa can be any naturally occurring amino acid
  VARIANT 914: note = Xaa can be any naturally occurring amino acid except Pro or Gly
  VARIANT 915: note = Xaa can be any naturally occurring amino acid except Pro or Gly
  VARIANT 917: note = Xaa can be any naturally occurring amino acid
  VARIANT 918: note = Xaa can be any naturally occurring amino acid
  VARIANT 919: note = Xaa can be any naturally occurring amino acid
  VARIANT 921: note = Xaa can be any naturally occurring amino acid except Pro or Gly
  VARIANT 922: note = Xaa can be any naturally occurring amino acid except Pro or Gly
  VARIANT 924: note = Xaa can be any naturally occurring amino acid
  VARIANT 925: note = Xaa can be any naturally occurring amino acid
  VARIANT 926: note = Xaa can be any naturally occurring amino acid
  VARIANT 928: note = Xaa can be any naturally occurring amino acid except Pro or Gly
  VARIANT 929: note = Xaa can be any naturally occurring amino acid except Pro or Gly
  VARIANT 931: note = Xaa can be any naturally occurring amino acid
  VARIANT 932: note = Xaa can be any naturally occurring amino acid
  VARIANT 933: note = Xaa can be any naturally occurring amino acid
  VARIANT 935: note = Xaa can be any naturally occurring amino acid except Pro or Gly
  VARIANT 936: note = Xaa can be any naturally occurring amino acid except Pro or Gly
  VARIANT 938: note = Xaa can be any naturally occurring amino acid
  VARIANT 939: note = Xaa can be any naturally occurring amino acid
  VARIANT 940: note = Xaa can be any naturally occurring amino acid
  VARIANT 942: note = Xaa can be any naturally occurring amino acid except Pro or Gly
  VARIANT 943: note = Xaa can be any naturally occurring amino acid except Pro or Gly
  VARIANT 945: note = Xaa can be any naturally occurring amino acid
  VARIANT 946: note = Xaa can be any naturally occurring amino acid
  VARIANT 947: note = Xaa can be any naturally occurring amino acid
  VARIANT 949: note = Xaa can be any naturally occurring amino acid except Pro or Gly
  VARIANT 950: note = Xaa can be any naturally occurring amino acid except Pro or Gly
  VARIANT 952: note = Xaa can be any naturally occurring amino acid
  VARIANT 953: note = Xaa can be any naturally occurring amino acid
  VARIANT 954: note = Xaa can be any naturally occurring amino acid
  VARIANT 956: note = Xaa can be any naturally occurring amino acid except Pro or Gly
  VARIANT 957: note = Xaa can be any naturally occurring amino acid except Pro or Gly
  VARIANT 959: note = Xaa can be any naturally occurring amino acid
  VARIANT 960: note = Xaa can be any naturally occurring amino acid
  VARIANT 961: note = Xaa can be any naturally occurring amino acid
  VARIANT 963: note = Xaa can be any naturally occurring amino acid except Pro or Gly
  VARIANT 964: note = Xaa can be any naturally occurring amino acid except Pro or Gly
  VARIANT 966: note = Xaa can be any naturally occurring amino acid
  VARIANT 967: note = Xaa can be any naturally occurring amino acid
  VARIANT 968: note = Xaa can be any naturally occurring amino acid
  VARIANT 970: note = Xaa can be any naturally occurring amino acid except Pro or Gly
  VARIANT 971: note = Xaa can be any naturally occurring amino acid except Pro or Gly
  VARIANT 973: note = Xaa can be any naturally occurring amino acid
  VARIANT 974: note = Xaa can be any naturally occurring amino acid
  VARIANT 975: note = Xaa can be any naturally occurring amino acid
  VARIANT 977: note = Xaa can be any naturally occurring amino acid except Pro or Gly
  VARIANT 978: note = Xaa can be any naturally occurring amino acid except Pro or Gly
  VARIANT 980: note = Xaa can be any naturally occurring amino acid
  VARIANT 981: note = Xaa can be any naturally occurring amino acid
  VARIANT 982: note = Xaa can be any naturally occurring amino acid
  VARIANT 984: note = Xaa can be any naturally occurring amino acid except Pro or Gly
  VARIANT 985: note = Xaa can be any naturally occurring amino acid except Pro or Gly
  VARIANT 987: note = Xaa can be any naturally occurring amino acid
  VARIANT 988: note = Xaa can be any naturally occurring amino acid
  VARIANT 989: note = Xaa can be any naturally occurring amino acid
  VARIANT 991: note = Xaa can be any naturally occurring amino acid except Pro or Gly
  VARIANT 992: note = Xaa can be any naturally occurring amino acid except Pro or Gly
  VARIANT 994: note = Xaa can be any naturally occurring amino acid
  VARIANT 995: note = Xaa can be any naturally occurring amino acid
  VARIANT 996: note = Xaa can be any naturally occurring amino acid
  VARIANT 998: note = Xaa can be any naturally occurring amino acid except Pro or Gly
  VARIANT 999: note = Xaa can be any naturally occurring amino acid except Pro or Gly
  VARIANT 1001: note = Xaa can be any naturally occurring amino acid
  VARIANT 1002: note = Xaa can be any naturally occurring amino acid
  VARIANT 1003: note = Xaa can be any naturally occurring amino acid
  VARIANT 1005: note = Xaa can be any naturally occurring amino acid except Pro or Gly
  VARIANT 1006: note = Xaa can be any naturally occurring amino acid except Pro or Gly
  VARIANT 1008: note = Xaa can be any naturally occurring amino acid
  VARIANT 1009: note = Xaa can be any naturally occurring amino acid
  VARIANT 1010: note = Xaa can be any naturally occurring amino acid
  VARIANT 1012: note = Xaa can be any naturally occurring amino acid except Pro or Gly
  VARIANT 1013: note = Xaa can be any naturally occurring amino acid except Pro or Gly
  VARIANT 1015: note = Xaa can be any naturally occurring amino acid
  VARIANT 1016: note = Xaa can be any naturally occurring amino acid
  VARIANT 1017: note = Xaa can be any naturally occurring amino acid
  VARIANT 1019: note = Xaa can be any naturally occurring amino acid except Pro or Gly
  VARIANT 1020: note = Xaa can be any naturally occurring amino acid except Pro or Gly
  VARIANT 1022: note = Xaa can be any naturally occurring amino acid
  VARIANT 1023: note = Xaa can be any naturally occurring amino acid
  VARIANT 1024: note = Xaa can be any naturally occurring amino acid
  VARIANT 1026: note = Xaa can be any naturally occurring amino acid except Pro or Gly
  VARIANT 1027: note = Xaa can be any naturally occurring amino acid except Pro or Gly
  VARIANT 1029: note = Xaa can be any naturally occurring amino acid
  VARIANT 1030: note = Xaa can be any naturally occurring amino acid
  VARIANT 1031: note = Xaa can be any naturally occurring amino acid
  VARIANT 1033: note = Xaa can be any naturally occurring amino acid except Pro or Gly
  VARIANT 1034: note = Xaa can be any naturally occurring amino acid except Pro or Gly
  VARIANT 1036: note = Xaa can be any naturally occurring amino acid
  VARIANT 1037: note = Xaa can be any naturally occurring amino acid
  VARIANT 1038: note = Xaa can be any naturally occurring amino acid
  VARIANT 1040: note = Xaa can be any naturally occurring amino acid except Pro or Gly
  VARIANT 1041: note = Xaa can be any naturally occurring amino acid except Pro or Gly
  VARIANT 1043: note = Xaa can be any naturally occurring amino acid
  VARIANT 1044: note = Xaa can be any naturally occurring amino acid
  VARIANT 1045: note = Xaa can be any naturally occurring amino acid
  VARIANT 1047: note = Xaa can be any naturally occurring amino acid except Pro or Gly
  VARIANT 1048: note = Xaa can be any naturally occurring amino acid except Pro or Gly
  VARIANT 1050: note = Xaa can be any naturally occurring amino acid
  VARIANT 1051: note = Xaa can be any naturally occurring amino acid
  VARIANT 1052: note = Xaa can be any naturally occurring amino acid
  VARIANT 1054: note = Xaa can be any naturally occurring amino acid except Pro or Gly
  VARIANT 1055: note = Xaa can be any naturally occurring amino acid except Pro or Gly
  VARIANT 1057: note = Xaa can be any naturally occurring amino acid
  VARIANT 1058: note = Xaa can be any naturally occurring amino acid
  VARIANT 1059: note = Xaa can be any naturally occurring amino acid
  VARIANT 1061: note = Xaa can be any naturally occurring amino acid except Pro or Gly
  VARIANT 1062: note = Xaa can be any naturally occurring amino acid except Pro or Gly
  VARIANT 1064: note = Xaa can be any naturally occurring amino acid
  VARIANT 1065: note = Xaa can be any naturally occurring amino acid
  VARIANT 1066: note = Xaa can be any naturally occurring amino acid
  VARIANT 1068: note = Xaa can be any naturally occurring amino acid except Pro or Gly
  VARIANT 1069: note = Xaa can be any naturally occurring amino acid except Pro or Gly
  VARIANT 1071: note = Xaa can be any naturally occurring amino acid
  VARIANT 1072: note = Xaa can be any naturally occurring amino acid
  VARIANT 1073: note = Xaa can be any naturally occurring amino acid
  VARIANT 1075: note = Xaa can be any naturally occurring amino acid except Pro or Gly
  VARIANT 1076: note = Xaa can be any naturally occurring amino acid except Pro or Gly
  VARIANT 1078: note = Xaa can be any naturally occurring amino acid
  VARIANT 1079: note = Xaa can be any naturally occurring amino acid
  VARIANT 1080: note = Xaa can be any naturally occurring amino acid
  VARIANT 1082: note = Xaa can be any naturally occurring amino acid except Pro or Gly
  VARIANT 1083: note = Xaa can be any naturally occurring amino acid except Pro or Gly
  VARIANT 1085: note = Xaa can be any naturally occurring amino acid
  VARIANT 1086: note = Xaa can be any naturally occurring amino acid
  VARIANT 1087: note = Xaa can be any naturally occurring amino acid
  VARIANT 1089: note = Xaa can be any naturally occurring amino acid except Pro or Gly
  VARIANT 1090: note = Xaa can be any naturally occurring amino acid except Pro or Gly
  VARIANT 1092: note = Xaa can be any naturally occurring amino acid
  VARIANT 1093: note = Xaa can be any naturally occurring amino acid
  VARIANT 1094: note = Xaa can be any naturally occurring amino acid
  VARIANT 1096: note = Xaa can be any naturally occurring amino acid except Pro or Gly
  VARIANT 1097: note = Xaa can be any naturally occurring amino acid except Pro or Gly
  VARIANT 1099: note = Xaa can be any naturally occurring amino acid
  VARIANT 1100: note = Xaa can be any naturally occurring amino acid
  VARIANT 1101: note = Xaa can be any naturally occurring amino acid
  VARIANT 1103: note = Xaa can be any naturally occurring amino acid except Pro or Gly
  VARIANT 1104: note = Xaa can be any naturally occurring amino acid except Pro or Gly
  VARIANT 1106: note = Xaa can be any naturally occurring amino acid
  VARIANT 1107: note = Xaa can be any naturally occurring amino acid
  VARIANT 1108: note = Xaa can be any naturally occurring amino acid
  VARIANT 1110: note = Xaa can be any naturally occurring amino acid except Pro or Gly
  VARIANT 1111: note = Xaa can be any naturally occurring amino acid except Pro or Gly
  VARIANT 1113: note = Xaa can be any naturally occurring amino acid
  VARIANT 1114: note = Xaa can be any naturally occurring amino acid
  VARIANT 1115: note = Xaa can be any naturally occurring amino acid
  VARIANT 1117: note = Xaa can be any naturally occurring amino acid except Pro or Gly
  VARIANT 1118: note = Xaa can be any naturally occurring amino acid except Pro or Gly
  VARIANT 1120: note = Xaa can be any naturally occurring amino acid
XXPXXGXXXPXXGXXXPXXGXXXPXXGXXXPXXGXXXPXXGXXXPXXGXXXPXXGXXXPXXGXXXPXXGXXXPXXGXXXPXXGXXXPXXGXXXPXXGXXXPXXGXXXPXXGXXXPXXGXXXPXXGXXXPXXGXXXPXXGXXXPXXGXXXPXXGXXXPXXGXXXPXXGXXXPXXGXXXPXXGXXXPXXGXXXPXXGXXXPXXGXXXPXXGXXXPXXGXXXPXXGXXXPXXGXXXPXXGXXXPXXGXXXPXXGXXXPXXGXXXPXXGXXXPXXGXXXPXXGXXXPXXGXXXPXXGXXXPXXGXXXPXXGXXXPXXGXXXPXXGXXXPXXGXXXPXXGXXXPXXGXXXPXXGXXXPXXGXXXPXXGXXXPXXGXXXPXXGXXXPXXGXXXPXXGXXXPXXGXXXPXXGXXXPXXGXXXPXXGXXXPXXGXXXPXXGXXXPXXGXXXPXXGXXXPXXGXXXPXXGXXXPXXGXXXPXXGXXXPXXGXXXPXXGXXXPXXGXXXPXXGXXXPXXGXXXPXXGXXXPXXGXXXPXXGXXXPXXGXXXPXXGXXXPXXGXXXPXXGXXXPXXGXXXPXXGXXXPXXGXXXPXXGXXXPXXGXXXPXXGXXXPXXGXXXPXXGXXXPXXGXXXPXXGXXXPXXGXXXPXXGXXXPXXGXXXPXXGXXXPXXGXXXPXXGXXXPXXGXXXPXXGXXXPXXGXXXPXXGXXXPXXGXXXPXXGXXXPXXGXXXPXXGXXXPXXGXXXPXXGXXXPXXGXXXPXXGXXXPXXGXXXPXXGXXXPXXGXXXPXXGXXXPXXGXXXPXXGXXXPXXGXXXPXXGXXXPXXGXXXPXXGXXXPXXGXXXPXXGXXXPXXGXXXPXXGXXXPXXGXXXPXXGXXXPXXGXXXPXXGXXXPXXGXXXPXXGXXXPXXGXXXPXXGXXXPXXGXXXPXXGXXXPXXGXXXPXXGXXXPXXGXXXPXXGXXXPXXGXXXPXXGXXXPXXGXXXPXXGXXXPXXGXXXPXXGXXXPXXGXXXPXXGXXXPXXGXXXPXXGXXXPXXGXXXPXXGXXXPXXGXXXPXXGXXXPXXGXXXPXXGXXXPXXGXXXPXXGXXXPXXGXXXPXXGXXXPXXGXXXPXXGXXXPXXGXXXPXXGX

SEQ ID NO: 151 - protein, 1280 aa, synthetic construct
  REGION 1..1280: note = elastin-like polypeptide
  VARIANT 1: note = Xaa can be any naturally occurring amino acid
  VARIANT 2: note = Xaa can be any naturally occurring amino acid
  VARIANT 4: note = Xaa can be any naturally occurring amino acid except Pro or Gly
  VARIANT 5: note = Xaa can be any naturally occurring amino acid except Pro or Gly
  VARIANT 6: note = Xaa can be any naturally occurring amino acid except Pro or Gly
  VARIANT 8: note = Xaa can be any naturally occurring amino acid
  VARIANT 9: note = Xaa can be any naturally occurring amino acid
  VARIANT 10: note = Xaa can be any naturally occurring amino acid
  VARIANT 12: note = Xaa can be any naturally occurring amino acid except Pro or Gly
  VARIANT 13: note = Xaa can be any naturally occurring amino acid except Pro or Gly
  VARIANT 14: note = Xaa can be any naturally occurring amino acid except Pro or Gly
  VARIANT 16: note = Xaa can be any naturally occurring amino acid
  VARIANT 17: note = Xaa can be any naturally occurring amino acid
  VARIANT 18: note = Xaa can be any naturally occurring amino acid
  VARIANT 20: note = Xaa can be any naturally occurring amino acid except Pro or Gly
  VARIANT 21: note = Xaa can be any naturally occurring amino acid except Pro or Gly
  VARIANT 22: note = Xaa can be any naturally occurring amino acid except Pro or Gly
  VARIANT 24: note = Xaa can be any naturally occurring amino acid
  VARIANT 25: note = Xaa can be any naturally occurring amino acid
  VARIANT 26: note = Xaa can be any naturally occurring amino acid
  VARIANT 28: note = Xaa can be any naturally occurring amino acid except Pro or Gly
  VARIANT 29: note = Xaa can be any naturally occurring amino acid except Pro or Gly
  VARIANT 30: note = Xaa can be any naturally occurring amino acid except Pro or Gly
  VARIANT 32: note = Xaa can be any naturally occurring amino acid
  VARIANT 33: note = Xaa can be any naturally occurring amino acid
  VARIANT 34: note = Xaa can be any naturally occurring amino acid
  VARIANT 36: note = Xaa can be any naturally occurring amino acid except Pro or Gly
  VARIANT 37: note = Xaa can be any naturally occurring amino acid except Pro or Gly
  VARIANT 38: note = Xaa can be any naturally occurring amino acid except Pro or Gly
  VARIANT 40: note = Xaa can be any naturally occurring amino acid
  VARIANT 41: note = Xaa can be any naturally occurring amino acid
  VARIANT 42: note = Xaa can be any naturally occurring amino acid
  VARIANT 44: note = Xaa can be any naturally occurring amino acid except Pro or Gly
  VARIANT 45: note = Xaa can be any naturally occurring amino acid except Pro or Gly
  VARIANT 46: note = Xaa can be any naturally occurring amino acid except Pro or Gly
  VARIANT 48: note = Xaa can be any naturally occurring amino acid
  VARIANT 49: note = Xaa can be any naturally occurring amino acid
  VARIANT 50: note = Xaa can be any naturally occurring amino acid
  VARIANT 52: note = Xaa can be any naturally occurring amino acid except Pro or Gly
  VARIANT 53: note = Xaa can be any naturally occurring amino acid except Pro or Gly
  VARIANT 54: note = Xaa can be any naturally occurring amino acid except Pro or Gly
  VARIANT 56: note = Xaa can be any naturally occurring amino acid
  VARIANT 57: note = Xaa can be any naturally occurring amino acid
  VARIANT 58: note = Xaa can be any naturally occurring amino acid
  VARIANT 60: note = Xaa can be any naturally occurring amino acid except Pro or Gly
  VARIANT 61: note = Xaa can be any naturally occurring amino acid except Pro or Gly
  VARIANT 62: note = Xaa can be any naturally occurring amino acid except Pro or Gly
  VARIANT 64: note = Xaa can be any naturally occurring amino acid
  VARIANT 65: note = Xaa can be any naturally occurring amino acid
  VARIANT 66: note = Xaa can be any naturally occurring amino acid
  VARIANT 68: note = Xaa can be any naturally occurring amino acid except Pro or Gly
  VARIANT 69: note = Xaa can be any naturally occurring amino acid except Pro or Gly
  VARIANT 70: note = Xaa can be any naturally occurring amino acid except Pro or Gly
  VARIANT 72: note = Xaa can be any naturally occurring amino acid
  VARIANT 73: note = Xaa can be any naturally occurring amino acid
  VARIANT 74: note = Xaa can be any naturally occurring amino acid
  VARIANT 76: note = Xaa can be any naturally occurring amino acid except Pro or Gly
  VARIANT 77: note = Xaa can be any naturally occurring amino acid except Pro or Gly
  VARIANT 78: note = Xaa can be any naturally occurring amino acid except Pro or Gly
  VARIANT 80: note = Xaa can be any naturally occurring amino acid
  VARIANT 81..1280: note = May be present or absent in groups of the repeat unit Xaa Xaa ProXaa Xaa Xaa Gly Xaa
  VARIANT 81: note = Xaa can be any naturally occurring amino acid
  VARIANT 82: note = Xaa can be any naturally occurring amino acid
  VARIANT 84: note = Xaa can be any naturally occurring amino acid except Pro or Gly
  VARIANT 85: note = Xaa can be any naturally occurring amino acid except Pro or Gly
  VARIANT 86: note = Xaa can be any naturally occurring amino acid except Pro or Gly
  VARIANT 88: note = Xaa can be any naturally occurring amino acid
  VARIANT 89: note = Xaa can be any naturally occurring amino acid
  VARIANT 90: note = Xaa can be any naturally occurring amino acid
  VARIANT 92: note = Xaa can be any naturally occurring amino acid except Pro or Gly
  VARIANT 93: note = Xaa can be any naturally occurring amino acid except Pro or Gly
  VARIANT 94: note = Xaa can be any naturally occurring amino acid except Pro or Gly
  VARIANT 96: note = Xaa can be any naturally occurring amino acid
  VARIANT 97: note = Xaa can be any naturally occurring amino acid
  VARIANT 98: note = Xaa can be any naturally occurring amino acid
  VARIANT 100: note = Xaa can be any naturally occurring amino acid except Pro or Gly
  VARIANT 101: note = Xaa can be any naturally occurring amino acid except Pro or Gly
  VARIANT 102: note = Xaa can be any naturally occurring amino acid except Pro or Gly
  VARIANT 104: note = Xaa can be any naturally occurring amino acid
  VARIANT 105: note = Xaa can be any naturally occurring amino acid
  VARIANT 106: note = Xaa can be any naturally occurring amino acid
  VARIANT 108: note = Xaa can be any naturally occurring amino acid except Pro or Gly
  VARIANT 109: note = Xaa can be any naturally occurring amino acid except Pro or Gly
  VARIANT 110: note = Xaa can be any naturally occurring amino acid except Pro or Gly
  VARIANT 112: note = Xaa can be any naturally occurring amino acid
  VARIANT 113: note = Xaa can be any naturally occurring amino acid
  VARIANT 114: note = Xaa can be any naturally occurring amino acid
  VARIANT 116: note = Xaa can be any naturally occurring amino acid except Pro or Gly
  VARIANT 117: note = Xaa can be any naturally occurring amino acid except Pro or Gly
  VARIANT 118: note = Xaa can be any naturally occurring amino acid except Pro or Gly
  VARIANT 120: note = Xaa can be any naturally occurring amino acid
  VARIANT 121: note = Xaa can be any naturally occurring amino acid
  VARIANT 122: note = Xaa can be any naturally occurring amino acid
  VARIANT 124: note = Xaa can be any naturally occurring amino acid except Pro or Gly
  VARIANT 125: note = Xaa can be any naturally occurring amino acid except Pro or Gly
  VARIANT 126: note = Xaa can be any naturally occurring amino acid except Pro or Gly
  VARIANT 128: note = Xaa can be any naturally occurring amino acid
  VARIANT 129: note = Xaa can be any naturally occurring amino acid
  VARIANT 130: note = Xaa can be any naturally occurring amino acid
  VARIANT 132: note = Xaa can be any naturally occurring amino acid except Pro or Gly
  VARIANT 133: note = Xaa can be any naturally occurring amino acid except Pro or Gly
  VARIANT 134: note = Xaa can be any naturally occurring amino acid except Pro or Gly
  VARIANT 136: note = Xaa can be any naturally occurring amino acid
  VARIANT 137: note = Xaa can be any naturally occurring amino acid
  VARIANT 138: note = Xaa can be any naturally occurring amino acid
  VARIANT 140: note = Xaa can be any naturally occurring amino acid except Pro or Gly
  VARIANT 141: note = Xaa can be any naturally occurring amino acid except Pro or Gly
  VARIANT 142: note = Xaa can be any naturally occurring amino acid except Pro or Gly
  VARIANT 144: note = Xaa can be any naturally occurring amino acid
  VARIANT 145: note = Xaa can be any naturally occurring amino acid
  VARIANT 146: note = Xaa can be any naturally occurring amino acid
  VARIANT 148: note = Xaa can be any naturally occurring amino acid except Pro or Gly
  VARIANT 149: note = Xaa can be any naturally occurring amino acid except Pro or Gly
  VARIANT 150: note = Xaa can be any naturally occurring amino acid except Pro or Gly
  VARIANT 152: note = Xaa can be any naturally occurring amino acid
  VARIANT 153: note = Xaa can be any naturally occurring amino acid
  VARIANT 154: note = Xaa can be any naturally occurring amino acid
  VARIANT 156: note = Xaa can be any naturally occurring amino acid except Pro or Gly
  VARIANT 157: note = Xaa can be any naturally occurring amino acid except Pro or Gly
  VARIANT 158: note = Xaa can be any naturally occurring amino acid except Pro or Gly
  VARIANT 160: note = Xaa can be any naturally occurring amino acid
  VARIANT 161: note = Xaa can be any naturally occurring amino acid
  VARIANT 162: note = Xaa can be any naturally occurring amino acid
  VARIANT 164: note = Xaa can be any naturally occurring amino acid except Pro or Gly
  VARIANT 165: note = Xaa can be any naturally occurring amino acid except Pro or Gly
  VARIANT 166: note = Xaa can be any naturally occurring amino acid except Pro or Gly
  VARIANT 168: note = Xaa can be any naturally occurring amino acid
  VARIANT 169: note = Xaa can be any naturally occurring amino acid
  VARIANT 170: note = Xaa can be any naturally occurring amino acid
  VARIANT 172: note = Xaa can be any naturally occurring amino acid except Pro or Gly
  VARIANT 173: note = Xaa can be any naturally occurring amino acid except Pro or Gly
  VARIANT 174: note = Xaa can be any naturally occurring amino acid except Pro or Gly
  VARIANT 176: note = Xaa can be any naturally occurring amino acid
  VARIANT 177: note = Xaa can be any naturally occurring amino acid
  VARIANT 178: note = Xaa can be any naturally occurring amino acid
  VARIANT 180: note = Xaa can be any naturally occurring amino acid except Pro or Gly
  VARIANT 181: note = Xaa can be any naturally occurring amino acid except Pro or Gly
  VARIANT 182: note = Xaa can be any naturally occurring amino acid except Pro or Gly
  VARIANT 184: note = Xaa can be any naturally occurring amino acid
  VARIANT 185: note = Xaa can be any naturally occurring amino acid
  VARIANT 186: note = Xaa can be any naturally occurring amino acid
  VARIANT 188: note = Xaa can be any naturally occurring amino acid except Pro or Gly
  VARIANT 189: note = Xaa can be any naturally occurring amino acid except Pro or Gly
  VARIANT 190: note = Xaa can be any naturally occurring amino acid except Pro or Gly
  VARIANT 192: note = Xaa can be any naturally occurring amino acid
  VARIANT 193: note = Xaa can be any naturally occurring amino acid
  VARIANT 194: note = Xaa can be any naturally occurring amino acid
  VARIANT 196: note = Xaa can be any naturally occurring amino acid except Pro or Gly
  VARIANT 197: note = Xaa can be any naturally occurring amino acid except Pro or Gly
  VARIANT 198: note = Xaa can be any naturally occurring amino acid except Pro or Gly
  VARIANT 200: note = Xaa can be any naturally occurring amino acid
  VARIANT 201: note = Xaa can be any naturally occurring amino acid
  VARIANT 202: note = Xaa can be any naturally occurring amino acid
  VARIANT 204: note = Xaa can be any naturally occurring amino acid except Pro or Gly
  VARIANT 205: note = Xaa can be any naturally occurring amino acid except Pro or Gly
  VARIANT 206: note = Xaa can be any naturally occurring amino acid except Pro or Gly
  VARIANT 208: note = Xaa can be any naturally occurring amino acid
  VARIANT 209: note = Xaa can be any naturally occurring amino acid
  VARIANT 210: note = Xaa can be any naturally occurring amino acid
  VARIANT 212: note = Xaa can be any naturally occurring amino acid except Pro or Gly
  VARIANT 213: note = Xaa can be any naturally occurring amino acid except Pro or Gly
  VARIANT 214: note = Xaa can be any naturally occurring amino acid except Pro or Gly
  VARIANT 216: note = Xaa can be any naturally occurring amino acid
  VARIANT 217: note = Xaa can be any naturally occurring amino acid
  VARIANT 218: note = Xaa can be any naturally occurring amino acid
  VARIANT 220: note = Xaa can be any naturally occurring amino acid except Pro or Gly
  VARIANT 221: note = Xaa can be any naturally occurring amino acid except Pro or Gly
  VARIANT 222: note = Xaa can be any naturally occurring amino acid except Pro or Gly
  VARIANT 224: note = Xaa can be any naturally occurring amino acid
  VARIANT 225: note = Xaa can be any naturally occurring amino acid
  VARIANT 226: note = Xaa can be any naturally occurring amino acid
  VARIANT 228: note = Xaa can be any naturally occurring amino acid except Pro or Gly
  VARIANT 229: note = Xaa can be any naturally occurring amino acid except Pro or Gly
  VARIANT 230: note = Xaa can be any naturally occurring amino acid except Pro or Gly
  VARIANT 232: note = Xaa can be any naturally occurring amino acid
  VARIANT 233: note = Xaa can be any naturally occurring amino acid
  VARIANT 234: note = Xaa can be any naturally occurring amino acid
  VARIANT 236: note = Xaa can be any naturally occurring amino acid except Pro or Gly
  VARIANT 237: note = Xaa can be any naturally occurring amino acid except Pro or Gly
  VARIANT 238: note = Xaa can be any naturally occurring amino acid except Pro or Gly
  VARIANT 240: note = Xaa can be any naturally occurring amino acid
  VARIANT 241: note = Xaa can be any naturally occurring amino acid
  VARIANT 242: note = Xaa can be any naturally occurring amino acid
  VARIANT 244: note = Xaa can be any naturally occurring amino acid except Pro or Gly
  VARIANT 245: note = Xaa can be any naturally occurring amino acid except Pro or Gly
  VARIANT 246: note = Xaa can be any naturally occurring amino acid except Pro or Gly
  VARIANT 248: note = Xaa can be any naturally occurring amino acid
  VARIANT 249: note = Xaa can be any naturally occurring amino acid
  VARIANT 250: note = Xaa can be any naturally occurring amino acid
  VARIANT 252: note = Xaa can be any naturally occurring amino acid except Pro or Gly
  VARIANT 253: note = Xaa can be any naturally occurring amino acid except Pro or Gly
  VARIANT 254: note = Xaa can be any naturally occurring amino acid except Pro or Gly
  VARIANT 256: note = Xaa can be any naturally occurring amino acid
  VARIANT 257: note = Xaa can be any naturally occurring amino acid
  VARIANT 258: note = Xaa can be any naturally occurring amino acid
  VARIANT 260: note = Xaa can be any naturally occurring amino acid except Pro or Gly
  VARIANT 261: note = Xaa can be any naturally occurring amino acid except Pro or Gly
  VARIANT 262: note = Xaa can be any naturally occurring amino acid except Pro or Gly
  VARIANT 264: note = Xaa can be any naturally occurring amino acid
  VARIANT 265: note = Xaa can be any naturally occurring amino acid
  VARIANT 266: note = Xaa can be any naturally occurring amino acid
  VARIANT 268: note = Xaa can be any naturally occurring amino acid except Pro or Gly
  VARIANT 269: note = Xaa can be any naturally occurring amino acid except Pro or Gly
  VARIANT 270: note = Xaa can be any naturally occurring amino acid except Pro or Gly
  VARIANT 272: note = Xaa can be any naturally occurring amino acid
  VARIANT 273: note = Xaa can be any naturally occurring amino acid
  VARIANT 274: note = Xaa can be any naturally occurring amino acid
  VARIANT 276: note = Xaa can be any naturally occurring amino acid except Pro or Gly
  VARIANT 277: note = Xaa can be any naturally occurring amino acid except Pro or Gly
  VARIANT 278: note = Xaa can be any naturally occurring amino acid except Pro or Gly
  VARIANT 280: note = Xaa can be any naturally occurring amino acid
  VARIANT 281: note = Xaa can be any naturally occurring amino acid
  VARIANT 282: note = Xaa can be any naturally occurring amino acid
  VARIANT 284: note = Xaa can be any naturally occurring amino acid except Pro or Gly
  VARIANT 285: note = Xaa can be any naturally occurring amino acid except Pro or Gly
  VARIANT 286: note = Xaa can be any naturally occurring amino acid except Pro or Gly
  VARIANT 288: note = Xaa can be any naturally occurring amino acid
  VARIANT 289: note = Xaa can be any naturally occurring amino acid
  VARIANT 290: note = Xaa can be any naturally occurring amino acid
  VARIANT 292: note = Xaa can be any naturally occurring amino acid except Pro or Gly
  VARIANT 293: note = Xaa can be any naturally occurring amino acid except Pro or Gly
  VARIANT 294: note = Xaa can be any naturally occurring amino acid except Pro or Gly
  VARIANT 296: note = Xaa can be any naturally occurring amino acid
  VARIANT 297: note = Xaa can be any naturally occurring amino acid
  VARIANT 298: note = Xaa can be any naturally occurring amino acid
  VARIANT 300: note = Xaa can be any naturally occurring amino acid except Pro or Gly
  VARIANT 301: note = Xaa can be any naturally occurring amino acid except Pro or Gly
  VARIANT 302: note = Xaa can be any naturally occurring amino acid except Pro or Gly
  VARIANT 304: note = Xaa can be any naturally occurring amino acid
  VARIANT 305: note = Xaa can be any naturally occurring amino acid
  VARIANT 306: note = Xaa can be any naturally occurring amino acid
  VARIANT 308: note = Xaa can be any naturally occurring amino acid except Pro or Gly
  VARIANT 309: note = Xaa can be any naturally occurring amino acid except Pro or Gly
  VARIANT 310: note = Xaa can be any naturally occurring amino acid except Pro or Gly
  VARIANT 312: note = Xaa can be any naturally occurring amino acid
  VARIANT 313: note = Xaa can be any naturally occurring amino acid
  VARIANT 314: note = Xaa can be any naturally occurring amino acid
  VARIANT 316: note = Xaa can be any naturally occurring amino acid except Pro or Gly
  VARIANT 317: note = Xaa can be any naturally occurring amino acid except Pro or Gly
  VARIANT 318: note = Xaa can be any naturally occurring amino acid except Pro or Gly
  VARIANT 320: note = Xaa can be any naturally occurring amino acid
  VARIANT 321: note = Xaa can be any naturally occurring amino acid
  VARIANT 322: note = Xaa can be any naturally occurring amino acid
  VARIANT 324: note = Xaa can be any naturally occurring amino acid except Pro or Gly
  VARIANT 325: note = Xaa can be any naturally occurring amino acid except Pro or Gly
  VARIANT 326: note = Xaa can be any naturally occurring amino acid except Pro or Gly
  VARIANT 328: note = Xaa can be any naturally occurring amino acid
  VARIANT 329: note = Xaa can be any naturally occurring amino acid
  VARIANT 330: note = Xaa can be any naturally occurring amino acid
  VARIANT 332: note = Xaa can be any naturally occurring amino acid except Pro or Gly
  VARIANT 333: note = Xaa can be any naturally occurring amino acid except Pro or Gly
  VARIANT 334: note = Xaa can be any naturally occurring amino acid except Pro or Gly
  VARIANT 336: note = Xaa can be any naturally occurring amino acid
  VARIANT 337: note = Xaa can be any naturally occurring amino acid
  VARIANT 338: note = Xaa can be any naturally occurring amino acid
  VARIANT 340: note = Xaa can be any naturally occurring amino acid except Pro or Gly
  VARIANT 341: note = Xaa can be any naturally occurring amino acid except Pro or Gly
  VARIANT 342: note = Xaa can be any naturally occurring amino acid except Pro or Gly
  VARIANT 344: note = Xaa can be any naturally occurring amino acid
  VARIANT 345: note = Xaa can be any naturally occurring amino acid
  VARIANT 346: note = Xaa can be any naturally occurring amino acid
  VARIANT 348: note = Xaa can be any naturally occurring amino acid except Pro or Gly
  VARIANT 349: note = Xaa can be any naturally occurring amino acid except Pro or Gly
  VARIANT 350: note = Xaa can be any naturally occurring amino acid except Pro or Gly
  VARIANT 352: note = Xaa can be any naturally occurring amino acid
  VARIANT 353: note = Xaa can be any naturally occurring amino acid
  VARIANT 354: note = Xaa can be any naturally occurring amino acid
  VARIANT 356: note = Xaa can be any naturally occurring amino acid except Pro or Gly
  VARIANT 357: note = Xaa can be any naturally occurring amino acid except Pro or Gly
  VARIANT 358: note = Xaa can be any naturally occurring amino acid except Pro or Gly
  VARIANT 360: note = Xaa can be any naturally occurring amino acid
  VARIANT 361: note = Xaa can be any naturally occurring amino acid
  VARIANT 362: note = Xaa can be any naturally occurring amino acid
  VARIANT 364: note = Xaa can be any naturally occurring amino acid except Pro or Gly
  VARIANT 365: note = Xaa can be any naturally occurring amino acid except Pro or Gly
  VARIANT 366: note = Xaa can be any naturally occurring amino acid except Pro or Gly
  VARIANT 368: note = Xaa can be any naturally occurring amino acid
  VARIANT 369: note = Xaa can be any naturally occurring amino acid
  VARIANT 370: note = Xaa can be any naturally occurring amino acid
  VARIANT 372: note = Xaa can be any naturally occurring amino acid except Pro or Gly
  VARIANT 373: note = Xaa can be any naturally occurring amino acid except Pro or Gly
  VARIANT 374: note = Xaa can be any naturally occurring amino acid except Pro or Gly
  VARIANT 376: note = Xaa can be any naturally occurring amino acid
  VARIANT 377: note = Xaa can be any naturally occurring amino acid
  VARIANT 378: note = Xaa can be any naturally occurring amino acid
  VARIANT 380: note = Xaa can be any naturally occurring amino acid except Pro or Gly
  VARIANT 381: note = Xaa can be any naturally occurring amino acid except Pro or Gly
  VARIANT 382: note = Xaa can be any naturally occurring amino acid except Pro or Gly
  VARIANT 384: note = Xaa can be any naturally occurring amino acid
  VARIANT 385: note = Xaa can be any naturally occurring amino acid
  VARIANT 386: note = Xaa can be any naturally occurring amino acid
  VARIANT 388: note = Xaa can be any naturally occurring amino acid except Pro or Gly
  VARIANT 389: note = Xaa can be any naturally occurring amino acid except Pro or Gly
  VARIANT 390: note = Xaa can be any naturally occurring amino acid except Pro or Gly
  VARIANT 392: note = Xaa can be any naturally occurring amino acid
  VARIANT 393: note = Xaa can be any naturally occurring amino acid
  VARIANT 394: note = Xaa can be any naturally occurring amino acid
  VARIANT 396: note = Xaa can be any naturally occurring amino acid except Pro or Gly
  VARIANT 397: note = Xaa can be any naturally occurring amino acid except Pro or Gly
  VARIANT 398: note = Xaa can be any naturally occurring amino acid except Pro or Gly
  VARIANT 400: note = Xaa can be any naturally occurring amino acid
  VARIANT 401: note = Xaa can be any naturally occurring amino acid
  VARIANT 402: note = Xaa can be any naturally occurring amino acid
  VARIANT 404: note = Xaa can be any naturally occurring amino acid except Pro or Gly
  VARIANT 405: note = Xaa can be any naturally occurring amino acid except Pro or Gly
  VARIANT 406: note = Xaa can be any naturally occurring amino acid except Pro or Gly
  VARIANT 408: note = Xaa can be any naturally occurring amino acid
  VARIANT 409: note = Xaa can be any naturally occurring amino acid
  VARIANT 410: note = Xaa can be any naturally occurring amino acid
  VARIANT 412: note = Xaa can be any naturally occurring amino acid except Pro or Gly
  VARIANT 413: note = Xaa can be any naturally occurring amino acid except Pro or Gly
  VARIANT 414: note = Xaa can be any naturally occurring amino acid except Pro or Gly
  VARIANT 416: note = Xaa can be any naturally occurring amino acid
  VARIANT 417: note = Xaa can be any naturally occurring amino acid
  VARIANT 418: note = Xaa can be any naturally occurring amino acid
  VARIANT 420: note = Xaa can be any naturally occurring amino acid except Pro or Gly
  VARIANT 421: note = Xaa can be any naturally occurring amino acid except Pro or Gly
  VARIANT 422: note = Xaa can be any naturally occurring amino acid except Pro or Gly
  VARIANT 424: note = Xaa can be any naturally occurring amino acid
  VARIANT 425: note = Xaa can be any naturally occurring amino acid
  VARIANT 426: note = Xaa can be any naturally occurring amino acid
  VARIANT 428: note = Xaa can be any naturally occurring amino acid except Pro or Gly
  VARIANT 429: note = Xaa can be any naturally occurring amino acid except Pro or Gly
  VARIANT 430: note = Xaa can be any naturally occurring amino acid except Pro or Gly
  VARIANT 432: note = Xaa can be any naturally occurring amino acid
  VARIANT 433: note = Xaa can be any naturally occurring amino acid
  VARIANT 434: note = Xaa can be any naturally occurring amino acid
  VARIANT 436: note = Xaa can be any naturally occurring amino acid except Pro or Gly
  VARIANT 437: note = Xaa can be any naturally occurring amino acid except Pro or Gly
  VARIANT 438: note = Xaa can be any naturally occurring amino acid except Pro or Gly
  VARIANT 440: note = Xaa can be any naturally occurring amino acid
  VARIANT 441: note = Xaa can be any naturally occurring amino acid
  VARIANT 442: note = Xaa can be any naturally occurring amino acid
  VARIANT 444: note = Xaa can be any naturally occurring amino acid except Pro or Gly
  VARIANT 445: note = Xaa can be any naturally occurring amino acid except Pro or Gly
  VARIANT 446: note = Xaa can be any naturally occurring amino acid except Pro or Gly
  VARIANT 448: note = Xaa can be any naturally occurring amino acid
  VARIANT 449: note = Xaa can be any naturally occurring amino acid
  VARIANT 450: note = Xaa can be any naturally occurring amino acid
  VARIANT 452: note = Xaa can be any naturally occurring amino acid except Pro or Gly
  VARIANT 453: note = Xaa can be any naturally occurring amino acid except Pro or Gly
  VARIANT 454: note = Xaa can be any naturally occurring amino acid except Pro or Gly
  VARIANT 456: note = Xaa can be any naturally occurring amino acid
  VARIANT 457: note = Xaa can be any naturally occurring amino acid
  VARIANT 458: note = Xaa can be any naturally occurring amino acid
  VARIANT 460: note = Xaa can be any naturally occurring amino acid except Pro or Gly
  VARIANT 461: note = Xaa can be any naturally occurring amino acid except Pro or Gly
  VARIANT 462: note = Xaa can be any naturally occurring amino acid except Pro or Gly
  VARIANT 464: note = Xaa can be any naturally occurring amino acid
  VARIANT 465: note = Xaa can be any naturally occurring amino acid
  VARIANT 466: note = Xaa can be any naturally occurring amino acid
  VARIANT 468: note = Xaa can be any naturally occurring amino acid except Pro or Gly
  VARIANT 469: note = Xaa can be any naturally occurring amino acid except Pro or Gly
  VARIANT 470: note = Xaa can be any naturally occurring amino acid except Pro or Gly
  VARIANT 472: note = Xaa can be any naturally occurring amino acid
  VARIANT 473: note = Xaa can be any naturally occurring amino acid
  VARIANT 474: note = Xaa can be any naturally occurring amino acid
  VARIANT 476: note = Xaa can be any naturally occurring amino acid except Pro or Gly
  VARIANT 477: note = Xaa can be any naturally occurring amino acid except Pro or Gly
  VARIANT 478: note = Xaa can be any naturally occurring amino acid except Pro or Gly
  VARIANT 480: note = Xaa can be any naturally occurring amino acid
  VARIANT 481: note = Xaa can be any naturally occurring amino acid
  VARIANT 482: note = Xaa can be any naturally occurring amino acid
  VARIANT 484: note = Xaa can be any naturally occurring amino acid except Pro or Gly
  VARIANT 485: note = Xaa can be any naturally occurring amino acid except Pro or Gly
  VARIANT 486: note = Xaa can be any naturally occurring amino acid except Pro or Gly
  VARIANT 488: note = Xaa can be any naturally occurring amino acid
  VARIANT 489: note = Xaa can be any naturally occurring amino acid
  VARIANT 490: note = Xaa can be any naturally occurring amino acid
  VARIANT 492: note = Xaa can be any naturally occurring amino acid except Pro or Gly
  VARIANT 493: note = Xaa can be any naturally occurring amino acid except Pro or Gly
  VARIANT 494: note = Xaa can be any naturally occurring amino acid except Pro or Gly
  VARIANT 496: note = Xaa can be any naturally occurring amino acid
  VARIANT 497: note = Xaa can be any naturally occurring amino acid
  VARIANT 498: note = Xaa can be any naturally occurring amino acid
  VARIANT 500: note = Xaa can be any naturally occurring amino acid except Pro or Gly
  VARIANT 501: note = Xaa can be any naturally occurring amino acid except Pro or Gly
  VARIANT 502: note = Xaa can be any naturally occurring amino acid except Pro or Gly
  VARIANT 504: note = Xaa can be any naturally occurring amino acid
  VARIANT 505: note = Xaa can be any naturally occurring amino acid
  VARIANT 506: note = Xaa can be any naturally occurring amino acid
  VARIANT 508: note = Xaa can be any naturally occurring amino acid except Pro or Gly
  VARIANT 509: note = Xaa can be any naturally occurring amino acid except Pro or Gly
  VARIANT 510: note = Xaa can be any naturally occurring amino acid except Pro or Gly
  VARIANT 512: note = Xaa can be any naturally occurring amino acid
  VARIANT 513: note = Xaa can be any naturally occurring amino acid
  VARIANT 514: note = Xaa can be any naturally occurring amino acid
  VARIANT 516: note = Xaa can be any naturally occurring amino acid except Pro or Gly
  VARIANT 517: note = Xaa can be any naturally occurring amino acid except Pro or Gly
  VARIANT 518: note = Xaa can be any naturally occurring amino acid except Pro or Gly
  VARIANT 520: note = Xaa can be any naturally occurring amino acid
  VARIANT 521: note = Xaa can be any naturally occurring amino acid
  VARIANT 522: note = Xaa can be any naturally occurring amino acid
  VARIANT 524: note = Xaa can be any naturally occurring amino acid except Pro or Gly
  VARIANT 525: note = Xaa can be any naturally occurring amino acid except Pro or Gly
  VARIANT 526: note = Xaa can be any naturally occurring amino acid except Pro or Gly
  VARIANT 528: note = Xaa can be any naturally occurring amino acid
  VARIANT 529: note = Xaa can be any naturally occurring amino acid
  VARIANT 530: note = Xaa can be any naturally occurring amino acid
  VARIANT 532: note = Xaa can be any naturally occurring amino acid except Pro or Gly
  VARIANT 533: note = Xaa can be any naturally occurring amino acid except Pro or Gly
  VARIANT 534: note = Xaa can be any naturally occurring amino acid except Pro or Gly
  VARIANT 536: note = Xaa can be any naturally occurring amino acid
  VARIANT 537: note = Xaa can be any naturally occurring amino acid
  VARIANT 538: note = Xaa can be any naturally occurring amino acid
  VARIANT 540: note = Xaa can be any naturally occurring amino acid except Pro or Gly
  VARIANT 541: note = Xaa can be any naturally occurring amino acid except Pro or Gly
  VARIANT 542: note = Xaa can be any naturally occurring amino acid except Pro or Gly
  VARIANT 544: note = Xaa can be any naturally occurring amino acid
  VARIANT 545: note = Xaa can be any naturally occurring amino acid
  VARIANT 546: note = Xaa can be any naturally occurring amino acid
  VARIANT 548: note = Xaa can be any naturally occurring amino acid except Pro or Gly
  VARIANT 549: note = Xaa can be any naturally occurring amino acid except Pro or Gly
  VARIANT 550: note = Xaa can be any naturally occurring amino acid except Pro or Gly
  VARIANT 552: note = Xaa can be any naturally occurring amino acid
  VARIANT 553: note = Xaa can be any naturally occurring amino acid
  VARIANT 554: note = Xaa can be any naturally occurring amino acid
  VARIANT 556: note = Xaa can be any naturally occurring amino acid except Pro or Gly
  VARIANT 557: note = Xaa can be any naturally occurring amino acid except Pro or Gly
  VARIANT 558: note = Xaa can be any naturally occurring amino acid except Pro or Gly
  VARIANT 560: note = Xaa can be any naturally occurring amino acid
  VARIANT 561: note = Xaa can be any naturally occurring amino acid
  VARIANT 562: note = Xaa can be any naturally occurring amino acid
  VARIANT 564: note = Xaa can be any naturally occurring amino acid except Pro or Gly
  VARIANT 565: note = Xaa can be any naturally occurring amino acid except Pro or Gly
  VARIANT 566: note = Xaa can be any naturally occurring amino acid except Pro or Gly
  VARIANT 568: note = Xaa can be any naturally occurring amino acid
  VARIANT 569: note = Xaa can be any naturally occurring amino acid
  VARIANT 570: note = Xaa can be any naturally occurring amino acid
  VARIANT 572: note = Xaa can be any naturally occurring amino acid except Pro or Gly
  VARIANT 573: note = Xaa can be any naturally occurring amino acid except Pro or Gly
  VARIANT 574: note = Xaa can be any naturally occurring amino acid except Pro or Gly
  VARIANT 576: note = Xaa can be any naturally occurring amino acid
  VARIANT 577: note = Xaa can be any naturally occurring amino acid
  VARIANT 578: note = Xaa can be any naturally occurring amino acid
  VARIANT 580: note = Xaa can be any naturally occurring amino acid except Pro or Gly
  VARIANT 581: note = Xaa can be any naturally occurring amino acid except Pro or Gly
  VARIANT 582: note = Xaa can be any naturally occurring amino acid except Pro or Gly
  VARIANT 584: note = Xaa can be any naturally occurring amino acid
  VARIANT 585: note = Xaa can be any naturally occurring amino acid
  VARIANT 586: note = Xaa can be any naturally occurring amino acid
  VARIANT 588: note = Xaa can be any naturally occurring amino acid except Pro or Gly
  VARIANT 589: note = Xaa can be any naturally occurring amino acid except Pro or Gly
  VARIANT 590: note = Xaa can be any naturally occurring amino acid except Pro or Gly
  VARIANT 592: note = Xaa can be any naturally occurring amino acid
  VARIANT 593: note = Xaa can be any naturally occurring amino acid
  VARIANT 594: note = Xaa can be any naturally occurring amino acid
  VARIANT 596: note = Xaa can be any naturally occurring amino acid except Pro or Gly
  VARIANT 597: note = Xaa can be any naturally occurring amino acid except Pro or Gly
  VARIANT 598: note = Xaa can be any naturally occurring amino acid except Pro or Gly
  VARIANT 600: note = Xaa can be any naturally occurring amino acid
  VARIANT 601: note = Xaa can be any naturally occurring amino acid
  VARIANT 602: note = Xaa can be any naturally occurring amino acid
  VARIANT 604: note = Xaa can be any naturally occurring amino acid except Pro or Gly
  VARIANT 605: note = Xaa can be any naturally occurring amino acid except Pro or Gly
  VARIANT 606: note = Xaa can be any naturally occurring amino acid except Pro or Gly
  VARIANT 608: note = Xaa can be any naturally occurring amino acid
  VARIANT 609: note = Xaa can be any naturally occurring amino acid
  VARIANT 610: note = Xaa can be any naturally occurring amino acid
  VARIANT 612: note = Xaa can be any naturally occurring amino acid except Pro or Gly
  VARIANT 613: note = Xaa can be any naturally occurring amino acid except Pro or Gly
  VARIANT 614: note = Xaa can be any naturally occurring amino acid except Pro or Gly
  VARIANT 616: note = Xaa can be any naturally occurring amino acid
  VARIANT 617: note = Xaa can be any naturally occurring amino acid
  VARIANT 618: note = Xaa can be any naturally occurring amino acid
  VARIANT 620: note = Xaa can be any naturally occurring amino acid except Pro or Gly
  VARIANT 621: note = Xaa can be any naturally occurring amino acid except Pro or Gly
  VARIANT 622: note = Xaa can be any naturally occurring amino acid except Pro or Gly
  VARIANT 624: note = Xaa can be any naturally occurring amino acid
  VARIANT 625: note = Xaa can be any naturally occurring amino acid
  VARIANT 626: note = Xaa can be any naturally occurring amino acid
  VARIANT 628: note = Xaa can be any naturally occurring amino acid except Pro or Gly
  VARIANT 629: note = Xaa can be any naturally occurring amino acid except Pro or Gly
  VARIANT 630: note = Xaa can be any naturally occurring amino acid except Pro or Gly
  VARIANT 632: note = Xaa can be any naturally occurring amino acid
  VARIANT 633: note = Xaa can be any naturally occurring amino acid
  VARIANT 634: note = Xaa can be any naturally occurring amino acid
  VARIANT 636: note = Xaa can be any naturally occurring amino acid except Pro or Gly
  VARIANT 637: note = Xaa can be any naturally occurring amino acid except Pro or Gly
  VARIANT 638: note = Xaa can be any naturally occurring amino acid except Pro or Gly
  VARIANT 640: note = Xaa can be any naturally occurring amino acid
  VARIANT 641: note = Xaa can be any naturally occurring amino acid
  VARIANT 642: note = Xaa can be any naturally occurring amino acid
  VARIANT 644: note = Xaa can be any naturally occurring amino acid except Pro or Gly
  VARIANT 645: note = Xaa can be any naturally occurring amino acid except Pro or Gly
  VARIANT 646: note = Xaa can be any naturally occurring amino acid except Pro or Gly
  VARIANT 648: note = Xaa can be any naturally occurring amino acid
  VARIANT 649: note = Xaa can be any naturally occurring amino acid
  VARIANT 650: note = Xaa can be any naturally occurring amino acid
  VARIANT 652: note = Xaa can be any naturally occurring amino acid except Pro or Gly
  VARIANT 653: note = Xaa can be any naturally occurring amino acid except Pro or Gly
  VARIANT 654: note = Xaa can be any naturally occurring amino acid except Pro or Gly
  VARIANT 656: note = Xaa can be any naturally occurring amino acid
  VARIANT 657: note = Xaa can be any naturally occurring amino acid
  VARIANT 658: note = Xaa can be any naturally occurring amino acid
  VARIANT 660: note = Xaa can be any naturally occurring amino acid except Pro or Gly
  VARIANT 661: note = Xaa can be any naturally occurring amino acid except Pro or Gly
  VARIANT 662: note = Xaa can be any naturally occurring amino acid except Pro or Gly
  VARIANT 664: note = Xaa can be any naturally occurring amino acid
  VARIANT 665: note = Xaa can be any naturally occurring amino acid
  VARIANT 666: note = Xaa can be any naturally occurring amino acid
  VARIANT 668: note = Xaa can be any naturally occurring amino acid except Pro or Gly
  VARIANT 669: note = Xaa can be any naturally occurring amino acid except Pro or Gly
  VARIANT 670: note = Xaa can be any naturally occurring amino acid except Pro or Gly
  VARIANT 672: note = Xaa can be any naturally occurring amino acid
  VARIANT 673: note = Xaa can be any naturally occurring amino acid
  VARIANT 674: note = Xaa can be any naturally occurring amino acid
  VARIANT 676: note = Xaa can be any naturally occurring amino acid except Pro or Gly
  VARIANT 677: note = Xaa can be any naturally occurring amino acid except Pro or Gly
  VARIANT 678: note = Xaa can be any naturally occurring amino acid except Pro or Gly
  VARIANT 680: note = Xaa can be any naturally occurring amino acid
  VARIANT 681: note = Xaa can be any naturally occurring amino acid
  VARIANT 682: note = Xaa can be any naturally occurring amino acid
  VARIANT 684: note = Xaa can be any naturally occurring amino acid except Pro or Gly
  VARIANT 685: note = Xaa can be any naturally occurring amino acid except Pro or Gly
  VARIANT 686: note = Xaa can be any naturally occurring amino acid except Pro or Gly
  VARIANT 688: note = Xaa can be any naturally occurring amino acid
  VARIANT 689: note = Xaa can be any naturally occurring amino acid
  VARIANT 690: note = Xaa can be any naturally occurring amino acid
  VARIANT 692: note = Xaa can be any naturally occurring amino acid except Pro or Gly
  VARIANT 693: note = Xaa can be any naturally occurring amino acid except Pro or Gly
  VARIANT 694: note = Xaa can be any naturally occurring amino acid except Pro or Gly
  VARIANT 696: note = Xaa can be any naturally occurring amino acid
  VARIANT 697: note = Xaa can be any naturally occurring amino acid
  VARIANT 698: note = Xaa can be any naturally occurring amino acid
  VARIANT 700: note = Xaa can be any naturally occurring amino acid except Pro or Gly
  VARIANT 701: note = Xaa can be any naturally occurring amino acid except Pro or Gly
  VARIANT 702: note = Xaa can be any naturally occurring amino acid except Pro or Gly
  VARIANT 704: note = Xaa can be any naturally occurring amino acid
  VARIANT 705: note = Xaa can be any naturally occurring amino acid
  VARIANT 706: note = Xaa can be any naturally occurring amino acid
  VARIANT 708: note = Xaa can be any naturally occurring amino acid except Pro or Gly
  VARIANT 709: note = Xaa can be any naturally occurring amino acid except Pro or Gly
  VARIANT 710: note = Xaa can be any naturally occurring amino acid except Pro or Gly
  VARIANT 712: note = Xaa can be any naturally occurring amino acid
  VARIANT 713: note = Xaa can be any naturally occurring amino acid
  VARIANT 714: note = Xaa can be any naturally occurring amino acid
  VARIANT 716: note = Xaa can be any naturally occurring amino acid except Pro or Gly
  VARIANT 717: note = Xaa can be any naturally occurring amino acid except Pro or Gly
  VARIANT 718: note = Xaa can be any naturally occurring amino acid except Pro or Gly
  VARIANT 720: note = Xaa can be any naturally occurring amino acid
  VARIANT 721: note = Xaa can be any naturally occurring amino acid
  VARIANT 722: note = Xaa can be any naturally occurring amino acid
  VARIANT 724: note = Xaa can be any naturally occurring amino acid except Pro or Gly
  VARIANT 725: note = Xaa can be any naturally occurring amino acid except Pro or Gly
  VARIANT 726: note = Xaa can be any naturally occurring amino acid except Pro or Gly
  VARIANT 728: note = Xaa can be any naturally occurring amino acid
  VARIANT 729: note = Xaa can be any naturally occurring amino acid
  VARIANT 730: note = Xaa can be any naturally occurring amino acid
  VARIANT 732: note = Xaa can be any naturally occurring amino acid except Pro or Gly
  VARIANT 733: note = Xaa can be any naturally occurring amino acid except Pro or Gly
  VARIANT 734: note = Xaa can be any naturally occurring amino acid except Pro or Gly
  VARIANT 736: note = Xaa can be any naturally occurring amino acid
  VARIANT 737: note = Xaa can be any naturally occurring amino acid
  VARIANT 738: note = Xaa can be any naturally occurring amino acid
  VARIANT 740: note = Xaa can be any naturally occurring amino acid except Pro or Gly
  VARIANT 741: note = Xaa can be any naturally occurring amino acid except Pro or Gly
  VARIANT 742: note = Xaa can be any naturally occurring amino acid except Pro or Gly
  VARIANT 744: note = Xaa can be any naturally occurring amino acid
  VARIANT 745: note = Xaa can be any naturally occurring amino acid
  VARIANT 746: note = Xaa can be any naturally occurring amino acid
  VARIANT 748: note = Xaa can be any naturally occurring amino acid except Pro or Gly
  VARIANT 749: note = Xaa can be any naturally occurring amino acid except Pro or Gly
  VARIANT 750: note = Xaa can be any naturally occurring amino acid except Pro or Gly
  VARIANT 752: note = Xaa can be any naturally occurring amino acid
  VARIANT 753: note = Xaa can be any naturally occurring amino acid
  VARIANT 754: note = Xaa can be any naturally occurring amino acid
  VARIANT 756: note = Xaa can be any naturally occurring amino acid except Pro or Gly
  VARIANT 757: note = Xaa can be any naturally occurring amino acid except Pro or Gly
  VARIANT 758: note = Xaa can be any naturally occurring amino acid except Pro or Gly
  VARIANT 760: note = Xaa can be any naturally occurring amino acid
  VARIANT 761: note = Xaa can be any naturally occurring amino acid
  VARIANT 762: note = Xaa can be any naturally occurring amino acid
  VARIANT 764: note = Xaa can be any naturally occurring amino acid except Pro or Gly
  VARIANT 765: note = Xaa can be any naturally occurring amino acid except Pro or Gly
  VARIANT 766: note = Xaa can be any naturally occurring amino acid except Pro or Gly
  VARIANT 768: note = Xaa can be any naturally occurring amino acid
  VARIANT 769: note = Xaa can be any naturally occurring amino acid
  VARIANT 770: note = Xaa can be any naturally occurring amino acid
  VARIANT 772: note = Xaa can be any naturally occurring amino acid except Pro or Gly
  VARIANT 773: note = Xaa can be any naturally occurring amino acid except Pro or Gly
  VARIANT 774: note = Xaa can be any naturally occurring amino acid except Pro or Gly
  VARIANT 776: note = Xaa can be any naturally occurring amino acid
  VARIANT 777: note = Xaa can be any naturally occurring amino acid
  VARIANT 778: note = Xaa can be any naturally occurring amino acid
  VARIANT 780: note = Xaa can be any naturally occurring amino acid except Pro or Gly
  VARIANT 781: note = Xaa can be any naturally occurring amino acid except Pro or Gly
  VARIANT 782: note = Xaa can be any naturally occurring amino acid except Pro or Gly
  VARIANT 784: note = Xaa can be any naturally occurring amino acid
  VARIANT 785: note = Xaa can be any naturally occurring amino acid
  VARIANT 786: note = Xaa can be any naturally occurring amino acid
  VARIANT 788: note = Xaa can be any naturally occurring amino acid except Pro or Gly
  VARIANT 789: note = Xaa can be any naturally occurring amino acid except Pro or Gly
  VARIANT 790: note = Xaa can be any naturally occurring amino acid except Pro or Gly
  VARIANT 792: note = Xaa can be any naturally occurring amino acid
  VARIANT 793: note = Xaa can be any naturally occurring amino acid
  VARIANT 794: note = Xaa can be any naturally occurring amino acid
  VARIANT 796: note = Xaa can be any naturally occurring amino acid except Pro or Gly
  VARIANT 797: note = Xaa can be any naturally occurring amino acid except Pro or Gly
  VARIANT 798: note = Xaa can be any naturally occurring amino acid except Pro or Gly
  VARIANT 800: note = Xaa can be any naturally occurring amino acid
  VARIANT 801: note = Xaa can be any naturally occurring amino acid
  VARIANT 802: note = Xaa can be any naturally occurring amino acid
  VARIANT 804: note = Xaa can be any naturally occurring amino acid except Pro or Gly
  VARIANT 805: note = Xaa can be any naturally occurring amino acid except Pro or Gly
  VARIANT 806: note = Xaa can be any naturally occurring amino acid except Pro or Gly
  VARIANT 808: note = Xaa can be any naturally occurring amino acid
  VARIANT 809: note = Xaa can be any naturally occurring amino acid
  VARIANT 810: note = Xaa can be any naturally occurring amino acid
  VARIANT 812: note = Xaa can be any naturally occurring amino acid except Pro or Gly
  VARIANT 813: note = Xaa can be any naturally occurring amino acid except Pro or Gly
  VARIANT 814: note = Xaa can be any naturally occurring amino acid except Pro or Gly
  VARIANT 816: note = Xaa can be any naturally occurring amino acid
  VARIANT 817: note = Xaa can be any naturally occurring amino acid
  VARIANT 818: note = Xaa can be any naturally occurring amino acid
  VARIANT 820: note = Xaa can be any naturally occurring amino acid except Pro or Gly
  VARIANT 821: note = Xaa can be any naturally occurring amino acid except Pro or Gly
  VARIANT 822: note = Xaa can be any naturally occurring amino acid except Pro or Gly
  VARIANT 824: note = Xaa can be any naturally occurring amino acid
  VARIANT 825: note = Xaa can be any naturally occurring amino acid
  VARIANT 826: note = Xaa can be any naturally occurring amino acid
  VARIANT 828: note = Xaa can be any naturally occurring amino acid except Pro or Gly
  VARIANT 829: note = Xaa can be any naturally occurring amino acid except Pro or Gly
  VARIANT 830: note = Xaa can be any naturally occurring amino acid except Pro or Gly
  VARIANT 832: note = Xaa can be any naturally occurring amino acid
  VARIANT 833: note = Xaa can be any naturally occurring amino acid
  VARIANT 834: note = Xaa can be any naturally occurring amino acid
  VARIANT 836: note = Xaa can be any naturally occurring amino acid except Pro or Gly
  VARIANT 837: note = Xaa can be any naturally occurring amino acid except Pro or Gly
  VARIANT 838: note = Xaa can be any naturally occurring amino acid except Pro or Gly
  VARIANT 840: note = Xaa can be any naturally occurring amino acid
  VARIANT 841: note = Xaa can be any naturally occurring amino acid
  VARIANT 842: note = Xaa can be any naturally occurring amino acid
  VARIANT 844: note = Xaa can be any naturally occurring amino acid except Pro or Gly
  VARIANT 845: note = Xaa can be any naturally occurring amino acid except Pro or Gly
  VARIANT 846: note = Xaa can be any naturally occurring amino acid except Pro or Gly
  VARIANT 848: note = Xaa can be any naturally occurring amino acid
  VARIANT 849: note = Xaa can be any naturally occurring amino acid
  VARIANT 850: note = Xaa can be any naturally occurring amino acid
  VARIANT 852: note = Xaa can be any naturally occurring amino acid except Pro or Gly
  VARIANT 853: note = Xaa can be any naturally occurring amino acid except Pro or Gly
  VARIANT 854: note = Xaa can be any naturally occurring amino acid except Pro or Gly
  VARIANT 856: note = Xaa can be any naturally occurring amino acid
  VARIANT 857: note = Xaa can be any naturally occurring amino acid
  VARIANT 858: note = Xaa can be any naturally occurring amino acid
  VARIANT 860: note = Xaa can be any naturally occurring amino acid except Pro or Gly
  VARIANT 861: note = Xaa can be any naturally occurring amino acid except Pro or Gly
  VARIANT 862: note = Xaa can be any naturally occurring amino acid except Pro or Gly
  VARIANT 864: note = Xaa can be any naturally occurring amino acid
  VARIANT 865: note = Xaa can be any naturally occurring amino acid
  VARIANT 866: note = Xaa can be any naturally occurring amino acid
  VARIANT 868: note = Xaa can be any naturally occurring amino acid except Pro or Gly
  VARIANT 869: note = Xaa can be any naturally occurring amino acid except Pro or Gly
  VARIANT 870: note = Xaa can be any naturally occurring amino acid except Pro or Gly
  VARIANT 872: note = Xaa can be any naturally occurring amino acid
  VARIANT 873: note = Xaa can be any naturally occurring amino acid
  VARIANT 874: note = Xaa can be any naturally occurring amino acid
  VARIANT 876: note = Xaa can be any naturally occurring amino acid except Pro or Gly
  VARIANT 877: note = Xaa can be any naturally occurring amino acid except Pro or Gly
  VARIANT 878: note = Xaa can be any naturally occurring amino acid except Pro or Gly
  VARIANT 880: note = Xaa can be any naturally occurring amino acid
  VARIANT 881: note = Xaa can be any naturally occurring amino acid
  VARIANT 882: note = Xaa can be any naturally occurring amino acid
  VARIANT 884: note = Xaa can be any naturally occurring amino acid except Pro or Gly
  VARIANT 885: note = Xaa can be any naturally occurring amino acid except Pro or Gly
  VARIANT 886: note = Xaa can be any naturally occurring amino acid except Pro or Gly
  VARIANT 888: note = Xaa can be any naturally occurring amino acid
  VARIANT 889: note = Xaa can be any naturally occurring amino acid
  VARIANT 890: note = Xaa can be any naturally occurring amino acid
  VARIANT 892: note = Xaa can be any naturally occurring amino acid except Pro or Gly
  VARIANT 893: note = Xaa can be any naturally occurring amino acid except Pro or Gly
  VARIANT 894: note = Xaa can be any naturally occurring amino acid except Pro or Gly
  VARIANT 896: note = Xaa can be any naturally occurring amino acid
  VARIANT 897: note = Xaa can be any naturally occurring amino acid
  VARIANT 898: note = Xaa can be any naturally occurring amino acid
  VARIANT 900: note = Xaa can be any naturally occurring amino acid except Pro or Gly
  VARIANT 901: note = Xaa can be any naturally occurring amino acid except Pro or Gly
  VARIANT 902: note = Xaa can be any naturally occurring amino acid except Pro or Gly
  VARIANT 904: note = Xaa can be any naturally occurring amino acid
  VARIANT 905: note = Xaa can be any naturally occurring amino acid
  VARIANT 906: note = Xaa can be any naturally occurring amino acid
  VARIANT 908: note = Xaa can be any naturally occurring amino acid except Pro or Gly
  VARIANT 909: note = Xaa can be any naturally occurring amino acid except Pro or Gly
  VARIANT 910: note = Xaa can be any naturally occurring amino acid except Pro or Gly
  VARIANT 912: note = Xaa can be any naturally occurring amino acid
  VARIANT 913: note = Xaa can be any naturally occurring amino acid
  VARIANT 914: note = Xaa can be any naturally occurring amino acid
  VARIANT 916: note = Xaa can be any naturally occurring amino acid except Pro or Gly
  VARIANT 917: note = Xaa can be any naturally occurring amino acid except Pro or Gly
  VARIANT 918: note = Xaa can be any naturally occurring amino acid except Pro or Gly
  VARIANT 920: note = Xaa can be any naturally occurring amino acid
  VARIANT 921: note = Xaa can be any naturally occurring amino acid
  VARIANT 922: note = Xaa can be any naturally occurring amino acid
  VARIANT 924: note = Xaa can be any naturally occurring amino acid except Pro or Gly
  VARIANT 925: note = Xaa can be any naturally occurring amino acid except Pro or Gly
  VARIANT 926: note = Xaa can be any naturally occurring amino acid except Pro or Gly
  VARIANT 928: note = Xaa can be any naturally occurring amino acid
  VARIANT 929: note = Xaa can be any naturally occurring amino acid
  VARIANT 930: note = Xaa can be any naturally occurring amino acid
  VARIANT 932: note = Xaa can be any naturally occurring amino acid except Pro or Gly
  VARIANT 933: note = Xaa can be any naturally occurring amino acid except Pro or Gly
  VARIANT 934: note = Xaa can be any naturally occurring amino acid except Pro or Gly
  VARIANT 936: note = Xaa can be any naturally occurring amino acid
  VARIANT 937: note = Xaa can be any naturally occurring amino acid
  VARIANT 938: note = Xaa can be any naturally occurring amino acid
  VARIANT 940: note = Xaa can be any naturally occurring amino acid except Pro or Gly
  VARIANT 941: note = Xaa can be any naturally occurring amino acid except Pro or Gly
  VARIANT 942: note = Xaa can be any naturally occurring amino acid except Pro or Gly
  VARIANT 944: note = Xaa can be any naturally occurring amino acid
  VARIANT 945: note = Xaa can be any naturally occurring amino acid
  VARIANT 946: note = Xaa can be any naturally occurring amino acid
  VARIANT 948: note = Xaa can be any naturally occurring amino acid except Pro or Gly
  VARIANT 949: note = Xaa can be any naturally occurring amino acid except Pro or Gly
  VARIANT 950: note = Xaa can be any naturally occurring amino acid except Pro or Gly
  VARIANT 952: note = Xaa can be any naturally occurring amino acid
  VARIANT 953: note = Xaa can be any naturally occurring amino acid
  VARIANT 954: note = Xaa can be any naturally occurring amino acid
  VARIANT 956: note = Xaa can be any naturally occurring amino acid except Pro or Gly
  VARIANT 957: note = Xaa can be any naturally occurring amino acid except Pro or Gly
  VARIANT 958: note = Xaa can be any naturally occurring amino acid except Pro or Gly
  VARIANT 960: note = Xaa can be any naturally occurring amino acid
  VARIANT 961: note = Xaa can be any naturally occurring amino acid
  VARIANT 962: note = Xaa can be any naturally occurring amino acid
  VARIANT 964: note = Xaa can be any naturally occurring amino acid except Pro or Gly
  VARIANT 965: note = Xaa can be any naturally occurring amino acid except Pro or Gly
  VARIANT 966: note = Xaa can be any naturally occurring amino acid except Pro or Gly
  VARIANT 968: note = Xaa can be any naturally occurring amino acid
  VARIANT 969: note = Xaa can be any naturally occurring amino acid
  VARIANT 970: note = Xaa can be any naturally occurring amino acid
  VARIANT 972: note = Xaa can be any naturally occurring amino acid except Pro or Gly
  VARIANT 973: note = Xaa can be any naturally occurring amino acid except Pro or Gly
  VARIANT 974: note = Xaa can be any naturally occurring amino acid except Pro or Gly
  VARIANT 976: note = Xaa can be any naturally occurring amino acid
  VARIANT 977: note = Xaa can be any naturally occurring amino acid
  VARIANT 978: note = Xaa can be any naturally occurring amino acid
  VARIANT 980: note = Xaa can be any naturally occurring amino acid except Pro or Gly
  VARIANT 981: note = Xaa can be any naturally occurring amino acid except Pro or Gly
  VARIANT 982: note = Xaa can be any naturally occurring amino acid except Pro or Gly
  VARIANT 984: note = Xaa can be any naturally occurring amino acid
  VARIANT 985: note = Xaa can be any naturally occurring amino acid
  VARIANT 986: note = Xaa can be any naturally occurring amino acid
  VARIANT 988: note = Xaa can be any naturally occurring amino acid except Pro or Gly
  VARIANT 989: note = Xaa can be any naturally occurring amino acid except Pro or Gly
  VARIANT 990: note = Xaa can be any naturally occurring amino acid except Pro or Gly
  VARIANT 992: note = Xaa can be any naturally occurring amino acid
  VARIANT 993: note = Xaa can be any naturally occurring amino acid
  VARIANT 994: note = Xaa can be any naturally occurring amino acid
  VARIANT 996: note = Xaa can be any naturally occurring amino acid except Pro or Gly
  VARIANT 997: note = Xaa can be any naturally occurring amino acid except Pro or Gly
  VARIANT 998: note = Xaa can be any naturally occurring amino acid except Pro or Gly
  VARIANT 1000: note = Xaa can be any naturally occurring amino acid
  VARIANT 1001: note = Xaa can be any naturally occurring amino acid
  VARIANT 1002: note = Xaa can be any naturally occurring amino acid
  VARIANT 1004: note = Xaa can be any naturally occurring amino acid except Pro or Gly
  VARIANT 1005: note = Xaa can be any naturally occurring amino acid except Pro or Gly
  VARIANT 1006: note = Xaa can be any naturally occurring amino acid except Pro or Gly
  VARIANT 1008: note = Xaa can be any naturally occurring amino acid
  VARIANT 1009: note = Xaa can be any naturally occurring amino acid
  VARIANT 1010: note = Xaa can be any naturally occurring amino acid
  VARIANT 1012: note = Xaa can be any naturally occurring amino acid except Pro or Gly
  VARIANT 1013: note = Xaa can be any naturally occurring amino acid except Pro or Gly
  VARIANT 1014: note = Xaa can be any naturally occurring amino acid except Pro or Gly
  VARIANT 1016: note = Xaa can be any naturally occurring amino acid
  VARIANT 1017: note = Xaa can be any naturally occurring amino acid
  VARIANT 1018: note = Xaa can be any naturally occurring amino acid
  VARIANT 1020: note = Xaa can be any naturally occurring amino acid except Pro or Gly
  VARIANT 1021: note = Xaa can be any naturally occurring amino acid except Pro or Gly
  VARIANT 1022: note = Xaa can be any naturally occurring amino acid except Pro or Gly
  VARIANT 1024: note = Xaa can be any naturally occurring amino acid
  VARIANT 1025: note = Xaa can be any naturally occurring amino acid
  VARIANT 1026: note = Xaa can be any naturally occurring amino acid
  VARIANT 1028: note = Xaa can be any naturally occurring amino acid except Pro or Gly
  VARIANT 1029: note = Xaa can be any naturally occurring amino acid except Pro or Gly
  VARIANT 1030: note = Xaa can be any naturally occurring amino acid except Pro or Gly
  VARIANT 1032: note = Xaa can be any naturally occurring amino acid
  VARIANT 1033: note = Xaa can be any naturally occurring amino acid
  VARIANT 1034: note = Xaa can be any naturally occurring amino acid
  VARIANT 1036: note = Xaa can be any naturally occurring amino acid except Pro or Gly
  VARIANT 1037: note = Xaa can be any naturally occurring amino acid except Pro or Gly
  VARIANT 1038: note = Xaa can be any naturally occurring amino acid except Pro or Gly
  VARIANT 1040: note = Xaa can be any naturally occurring amino acid
  VARIANT 1041: note = Xaa can be any naturally occurring amino acid
  VARIANT 1042: note = Xaa can be any naturally occurring amino acid
  VARIANT 1044: note = Xaa can be any naturally occurring amino acid except Pro or Gly
  VARIANT 1045: note = Xaa can be any naturally occurring amino acid except Pro or Gly
  VARIANT 1046: note = Xaa can be any naturally occurring amino acid except Pro or Gly
  VARIANT 1048: note = Xaa can be any naturally occurring amino acid
  VARIANT 1049: note = Xaa can be any naturally occurring amino acid
  VARIANT 1050: note = Xaa can be any naturally occurring amino acid
  VARIANT 1052: note = Xaa can be any naturally occurring amino acid except Pro or Gly
  VARIANT 1053: note = Xaa can be any naturally occurring amino acid except Pro or Gly
  VARIANT 1054: note = Xaa can be any naturally occurring amino acid except Pro or Gly
  VARIANT 1056: note = Xaa can be any naturally occurring amino acid
  VARIANT 1057: note = Xaa can be any naturally occurring amino acid
  VARIANT 1058: note = Xaa can be any naturally occurring amino acid
  VARIANT 1060: note = Xaa can be any naturally occurring amino acid except Pro or Gly
  VARIANT 1061: note = Xaa can be any naturally occurring amino acid except Pro or Gly
  VARIANT 1062: note = Xaa can be any naturally occurring amino acid except Pro or Gly
  VARIANT 1064: note = Xaa can be any naturally occurring amino acid
  VARIANT 1065: note = Xaa can be any naturally occurring amino acid
  VARIANT 1066: note = Xaa can be any naturally occurring amino acid
  VARIANT 1068: note = Xaa can be any naturally occurring amino acid except Pro or Gly
  VARIANT 1069: note = Xaa can be any naturally occurring amino acid except Pro or Gly
  VARIANT 1070: note = Xaa can be any naturally occurring amino acid except Pro or Gly
  VARIANT 1072: note = Xaa can be any naturally occurring amino acid
  VARIANT 1073: note = Xaa can be any naturally occurring amino acid
  VARIANT 1074: note = Xaa can be any naturally occurring amino acid
  VARIANT 1076: note = Xaa can be any naturally occurring amino acid except Pro or Gly
  VARIANT 1077: note = Xaa can be any naturally occurring amino acid except Pro or Gly
  VARIANT 1078: note = Xaa can be any naturally occurring amino acid except Pro or Gly
  VARIANT 1080: note = Xaa can be any naturally occurring amino acid
  VARIANT 1081: note = Xaa can be any naturally occurring amino acid
  VARIANT 1082: note = Xaa can be any naturally occurring amino acid
  VARIANT 1084: note = Xaa can be any naturally occurring amino acid except Pro or Gly
  VARIANT 1085: note = Xaa can be any naturally occurring amino acid except Pro or Gly
  VARIANT 1086: note = Xaa can be any naturally occurring amino acid except Pro or Gly
  VARIANT 1088: note = Xaa can be any naturally occurring amino acid
  VARIANT 1089: note = Xaa can be any naturally occurring amino acid
  VARIANT 1090: note = Xaa can be any naturally occurring amino acid
  VARIANT 1092: note = Xaa can be any naturally occurring amino acid except Pro or Gly
  VARIANT 1093: note = Xaa can be any naturally occurring amino acid except Pro or Gly
  VARIANT 1094: note = Xaa can be any naturally occurring amino acid except Pro or Gly
  VARIANT 1096: note = Xaa can be any naturally occurring amino acid
  VARIANT 1097: note = Xaa can be any naturally occurring amino acid
  VARIANT 1098: note = Xaa can be any naturally occurring amino acid
  VARIANT 1100: note = Xaa can be any naturally occurring amino acid except Pro or Gly
  VARIANT 1101: note = Xaa can be any naturally occurring amino acid except Pro or Gly
  VARIANT 1102: note = Xaa can be any naturally occurring amino acid except Pro or Gly
  VARIANT 1104: note = Xaa can be any naturally occurring amino acid
  VARIANT 1105: note = Xaa can be any naturally occurring amino acid
  VARIANT 1106: note = Xaa can be any naturally occurring amino acid
  VARIANT 1108: note = Xaa can be any naturally occurring amino acid except Pro or Gly
  VARIANT 1109: note = Xaa can be any naturally occurring amino acid except Pro or Gly
  VARIANT 1110: note = Xaa can be any naturally occurring amino acid except Pro or Gly
  VARIANT 1112: note = Xaa can be any naturally occurring amino acid
  VARIANT 1113: note = Xaa can be any naturally occurring amino acid
  VARIANT 1114: note = Xaa can be any naturally occurring amino acid
  VARIANT 1116: note = Xaa can be any naturally occurring amino acid except Pro or Gly
  VARIANT 1117: note = Xaa can be any naturally occurring amino acid except Pro or Gly
  VARIANT 1118: note = Xaa can be any naturally occurring amino acid except Pro or Gly
  VARIANT 1120: note = Xaa can be any naturally occurring amino acid
  VARIANT 1121: note = Xaa can be any naturally occurring amino acid
  VARIANT 1122: note = Xaa can be any naturally occurring amino acid
  VARIANT 1124: note = Xaa can be any naturally occurring amino acid except Pro or Gly
  VARIANT 1125: note = Xaa can be any naturally occurring amino acid except Pro or Gly
  VARIANT 1126: note = Xaa can be any naturally occurring amino acid except Pro or Gly
  VARIANT 1128: note = Xaa can be any naturally occurring amino acid
  VARIANT 1129: note = Xaa can be any naturally occurring amino acid
  VARIANT 1130: note = Xaa can be any naturally occurring amino acid
  VARIANT 1132: note = Xaa can be any naturally occurring amino acid except Pro or Gly
  VARIANT 1133: note = Xaa can be any naturally occurring amino acid except Pro or Gly
  VARIANT 1134: note = Xaa can be any naturally occurring amino acid except Pro or Gly
  VARIANT 1136: note = Xaa can be any naturally occurring amino acid
  VARIANT 1137: note = Xaa can be any naturally occurring amino acid
  VARIANT 1138: note = Xaa can be any naturally occurring amino acid
  VARIANT 1140: note = Xaa can be any naturally occurring amino acid except Pro or Gly
  VARIANT 1141: note = Xaa can be any naturally occurring amino acid except Pro or Gly
  VARIANT 1142: note = Xaa can be any naturally occurring amino acid except Pro or Gly
  VARIANT 1144: note = Xaa can be any naturally occurring amino acid
  VARIANT 1145: note = Xaa can be any naturally occurring amino acid
  VARIANT 1146: note = Xaa can be any naturally occurring amino acid
  VARIANT 1148: note = Xaa can be any naturally occurring amino acid except Pro or Gly
  VARIANT 1149: note = Xaa can be any naturally occurring amino acid except Pro or Gly
  VARIANT 1150: note = Xaa can be any naturally occurring amino acid except Pro or Gly
  VARIANT 1152: note = Xaa can be any naturally occurring amino acid
  VARIANT 1153: note = Xaa can be any naturally occurring amino acid
  VARIANT 1154: note = Xaa can be any naturally occurring amino acid
  VARIANT 1156: note = Xaa can be any naturally occurring amino acid except Pro or Gly
  VARIANT 1157: note = Xaa can be any naturally occurring amino acid except Pro or Gly
  VARIANT 1158: note = Xaa can be any naturally occurring amino acid except Pro or Gly
  VARIANT 1160: note = Xaa can be any naturally occurring amino acid
  VARIANT 1161: note = Xaa can be any naturally occurring amino acid
  VARIANT 1162: note = Xaa can be any naturally occurring amino acid
  VARIANT 1164: note = Xaa can be any naturally occurring amino acid except Pro or Gly
  VARIANT 1165: note = Xaa can be any naturally occurring amino acid except Pro or Gly
  VARIANT 1166: note = Xaa can be any naturally occurring amino acid except Pro or Gly
  VARIANT 1168: note = Xaa can be any naturally occurring amino acid
  VARIANT 1169: note = Xaa can be any naturally occurring amino acid
  VARIANT 1170: note = Xaa can be any naturally occurring amino acid
  VARIANT 1172: note = Xaa can be any naturally occurring amino acid except Pro or Gly
  VARIANT 1173: note = Xaa can be any naturally occurring amino acid except Pro or Gly
  VARIANT 1174: note = Xaa can be any naturally occurring amino acid except Pro or Gly
  VARIANT 1176: note = Xaa can be any naturally occurring amino acid
  VARIANT 1177: note = Xaa can be any naturally occurring amino acid
  VARIANT 1178: note = Xaa can be any naturally occurring amino acid
  VARIANT 1180: note = Xaa can be any naturally occurring amino acid except Pro or Gly
  VARIANT 1181: note = Xaa can be any naturally occurring amino acid except Pro or Gly
  VARIANT 1182: note = Xaa can be any naturally occurring amino acid except Pro or Gly
  VARIANT 1184: note = Xaa can be any naturally occurring amino acid
  VARIANT 1185: note = Xaa can be any naturally occurring amino acid
  VARIANT 1186: note = Xaa can be any naturally occurring amino acid
  VARIANT 1188: note = Xaa can be any naturally occurring amino acid except Pro or Gly
  VARIANT 1189: note = Xaa can be any naturally occurring amino acid except Pro or Gly
  VARIANT 1190: note = Xaa can be any naturally occurring amino acid except Pro or Gly
  VARIANT 1192: note = Xaa can be any naturally occurring amino acid
  VARIANT 1193: note = Xaa can be any naturally occurring amino acid
  VARIANT 1194: note = Xaa can be any naturally occurring amino acid
  VARIANT 1196: note = Xaa can be any naturally occurring amino acid except Pro or Gly
  VARIANT 1197: note = Xaa can be any naturally occurring amino acid except Pro or Gly
  VARIANT 1198: note = Xaa can be any naturally occurring amino acid except Pro or Gly
  VARIANT 1200: note = Xaa can be any naturally occurring amino acid
  VARIANT 1201: note = Xaa can be any naturally occurring amino acid
  VARIANT 1202: note = Xaa can be any naturally occurring amino acid
  VARIANT 1204: note = Xaa can be any naturally occurring amino acid except Pro or Gly
  VARIANT 1205: note = Xaa can be any naturally occurring amino acid except Pro or Gly
  VARIANT 1206: note = Xaa can be any naturally occurring amino acid except Pro or Gly
  VARIANT 1208: note = Xaa can be any naturally occurring amino acid
  VARIANT 1209: note = Xaa can be any naturally occurring amino acid
  VARIANT 1210: note = Xaa can be any naturally occurring amino acid
  VARIANT 1212: note = Xaa can be any naturally occurring amino acid except Pro or Gly
  VARIANT 1213: note = Xaa can be any naturally occurring amino acid except Pro or Gly
  VARIANT 1214: note = Xaa can be any naturally occurring amino acid except Pro or Gly
  VARIANT 1216: note = Xaa can be any naturally occurring amino acid
  VARIANT 1217: note = Xaa can be any naturally occurring amino acid
  VARIANT 1218: note = Xaa can be any naturally occurring amino acid
  VARIANT 1220: note = Xaa can be any naturally occurring amino acid except Pro or Gly
  VARIANT 1221: note = Xaa can be any naturally occurring amino acid except Pro or Gly
  VARIANT 1222: note = Xaa can be any naturally occurring amino acid except Pro or Gly
  VARIANT 1224: note = Xaa can be any naturally occurring amino acid
  VARIANT 1225: note = Xaa can be any naturally occurring amino acid
  VARIANT 1226: note = Xaa can be any naturally occurring amino acid
  VARIANT 1228: note = Xaa can be any naturally occurring amino acid except Pro or Gly
  VARIANT 1229: note = Xaa can be any naturally occurring amino acid except Pro or Gly
  VARIANT 1230: note = Xaa can be any naturally occurring amino acid except Pro or Gly
  VARIANT 1232: note = Xaa can be any naturally occurring amino acid
  VARIANT 1233: note = Xaa can be any naturally occurring amino acid
  VARIANT 1234: note = Xaa can be any naturally occurring amino acid
  VARIANT 1236: note = Xaa can be any naturally occurring amino acid except Pro or Gly
  VARIANT 1237: note = Xaa can be any naturally occurring amino acid except Pro or Gly
  VARIANT 1238: note = Xaa can be any naturally occurring amino acid except Pro or Gly
  VARIANT 1240: note = Xaa can be any naturally occurring amino acid
  VARIANT 1241: note = Xaa can be any naturally occurring amino acid
  VARIANT 1242: note = Xaa can be any naturally occurring amino acid
  VARIANT 1244: note = Xaa can be any naturally occurring amino acid except Pro or Gly
  VARIANT 1245: note = Xaa can be any naturally occurring amino acid except Pro or Gly
  VARIANT 1246: note = Xaa can be any naturally occurring amino acid except Pro or Gly
  VARIANT 1248: note = Xaa can be any naturally occurring amino acid
  VARIANT 1249: note = Xaa can be any naturally occurring amino acid
  VARIANT 1250: note = Xaa can be any naturally occurring amino acid
  VARIANT 1252: note = Xaa can be any naturally occurring amino acid except Pro or Gly
  VARIANT 1253: note = Xaa can be any naturally occurring amino acid except Pro or Gly
  VARIANT 1254: note = Xaa can be any naturally occurring amino acid except Pro or Gly
  VARIANT 1256: note = Xaa can be any naturally occurring amino acid
  VARIANT 1257: note = Xaa can be any naturally occurring amino acid
  VARIANT 1258: note = Xaa can be any naturally occurring amino acid
  VARIANT 1260: note = Xaa can be any naturally occurring amino acid except Pro or Gly
  VARIANT 1261: note = Xaa can be any naturally occurring amino acid except Pro or Gly
  VARIANT 1262: note = Xaa can be any naturally occurring amino acid except Pro or Gly
  VARIANT 1264: note = Xaa can be any naturally occurring amino acid
  VARIANT 1265: note = Xaa can be any naturally occurring amino acid
  VARIANT 1266: note = Xaa can be any naturally occurring amino acid
  VARIANT 1268: note = Xaa can be any naturally occurring amino acid except Pro or Gly
  VARIANT 1269: note = Xaa can be any naturally occurring amino acid except Pro or Gly
  VARIANT 1270: note = Xaa can be any naturally occurring amino acid except Pro or Gly
  VARIANT 1272: note = Xaa can be any naturally occurring amino acid
  VARIANT 1273: note = Xaa can be any naturally occurring amino acid
  VARIANT 1274: note = Xaa can be any naturally occurring amino acid
  VARIANT 1276: note = Xaa can be any naturally occurring amino acid except Pro or Gly
  VARIANT 1277: note = Xaa can be any naturally occurring amino acid except Pro or Gly
  VARIANT 1278: note = Xaa can be any naturally occurring amino acid except Pro or Gly
  VARIANT 1280: note = Xaa can be any naturally occurring amino acid
XXPXXXGXXXPXXXGXXXPXXXGXXXPXXXGXXXPXXXGXXXPXXXGXXXPXXXGXXXPXXXGXXXPXXXGXXXPXXXGXXXPXXXGXXXPXXXGXXXPXXXGXXXPXXXGXXXPXXXGXXXPXXXGXXXPXXXGXXXPXXXGXXXPXXXGXXXPXXXGXXXPXXXGXXXPXXXGXXXPXXXGXXXPXXXGXXXPXXXGXXXPXXXGXXXPXXXGXXXPXXXGXXXPXXXGXXXPXXXGXXXPXXXGXXXPXXXGXXXPXXXGXXXPXXXGXXXPXXXGXXXPXXXGXXXPXXXGXXXPXXXGXXXPXXXGXXXPXXXGXXXPXXXGXXXPXXXGXXXPXXXGXXXPXXXGXXXPXXXGXXXPXXXGXXXPXXXGXXXPXXXGXXXPXXXGXXXPXXXGXXXPXXXGXXXPXXXGXXXPXXXGXXXPXXXGXXXPXXXGXXXPXXXGXXXPXXXGXXXPXXXGXXXPXXXGXXXPXXXGXXXPXXXGXXXPXXXGXXXPXXXGXXXPXXXGXXXPXXXGXXXPXXXGXXXPXXXGXXXPXXXGXXXPXXXGXXXPXXXGXXXPXXXGXXXPXXXGXXXPXXXGXXXPXXXGXXXPXXXGXXXPXXXGXXXPXXXGXXXPXXXGXXXPXXXGXXXPXXXGXXXPXXXGXXXPXXXGXXXPXXXGXXXPXXXGXXXPXXXGXXXPXXXGXXXPXXXGXXXPXXXGXXXPXXXGXXXPXXXGXXXPXXXGXXXPXXXGXXXPXXXGXXXPXXXGXXXPXXXGXXXPXXXGXXXPXXXGXXXPXXXGXXXPXXXGXXXPXXXGXXXPXXXGXXXPXXXGXXXPXXXGXXXPXXXGXXXPXXXGXXXPXXXGXXXPXXXGXXXPXXXGXXXPXXXGXXXPXXXGXXXPXXXGXXXPXXXGXXXPXXXGXXXPXXXGXXXPXXXGXXXPXXXGXXXPXXXGXXXPXXXGXXXPXXXGXXXPXXXGXXXPXXXGXXXPXXXGXXXPXXXGXXXPXXXGXXXPXXXGXXXPXXXGXXXPXXXGXXXPXXXGXXXPXXXGXXXPXXXGXXXPXXXGXXXPXXXGXXXPXXXGXXXPXXXGXXXPXXXGXXXPXXXGXXXPXXXGXXXPXXXGXXXPXXXGXXXPXXXGXXXPXXXGXXXPXXXGXXXPXXXGXXXPXXXGXXXPXXXGXXXPXXXGXXXPXXXGXXXPXXXGXXXPXXXGXXXPXXXGXXXPXXXGXXXPXXXGXXXPXXXGXXXPXXXGXXXPXXXGXXXPXXXGXXXPXXXGXXXPXXXGXXXPXXXGXXXPXXXGX

SEQ ID NO: 152 - protein, 1280 aa, synthetic construct
  REGION 1..1280: note = elastin-like polypeptide
  VARIANT 5: note = Xaa is Gln or Ser
  VARIANT 7: note = Xaa is Tyr or Val
  VARIANT 8: note = Xaa is Gln or Ser
  VARIANT 13: note = Xaa is Gln or Ser
  VARIANT 15: note = Xaa is Tyr or Val
  VARIANT 16: note = Xaa is Gln or Ser
  VARIANT 21: note = Xaa is Gln or Ser
  VARIANT 23: note = Xaa is Tyr or Val
  VARIANT 24: note = Xaa is Gln or Ser
  VARIANT 29: note = Xaa is Gln or Ser
  VARIANT 31: note = Xaa is Tyr or Val
  VARIANT 32: note = Xaa is Gln or Ser
  VARIANT 37: note = Xaa is Gln or Ser
  VARIANT 39: note = Xaa is Tyr or Val
  VARIANT 40: note = Xaa is Gln or Ser
  VARIANT 45: note = Xaa is Gln or Ser
  VARIANT 47: note = Xaa is Tyr or Val
  VARIANT 48: note = Xaa is Gln or Ser
  VARIANT 53: note = Xaa is Gln or Ser
  VARIANT 55: note = Xaa is Tyr or Val
  VARIANT 56: note = Xaa is Gln or Ser
  VARIANT 61: note = Xaa is Gln or Ser
  VARIANT 63: note = Xaa is Tyr or Val
  VARIANT 64: note = Xaa is Gln or Ser
  VARIANT 69: note = Xaa is Gln or Ser
  VARIANT 71: note = Xaa is Tyr or Val
  VARIANT 72: note = Xaa is Gln or Ser
  VARIANT 77: note = Xaa is Gln or Ser
  VARIANT 79: note = Xaa is Tyr or Val
  VARIANT 80: note = Xaa is Gln or Ser
  VARIANT 81..1280: note = May be present or absent in groups of the repeat unit Gly Arg GlyAsp Xaa Pro Xaa Xaa
  VARIANT 85: note = Xaa is Gln or Ser
  VARIANT 87: note = Xaa is Tyr or Val
  VARIANT 88: note = Xaa is Gln or Ser
  VARIANT 93: note = Xaa is Gln or Ser
  VARIANT 95: note = Xaa is Tyr or Val
  VARIANT 96: note = Xaa is Gln or Ser
  VARIANT 101: note = Xaa is Gln or Ser
  VARIANT 103: note = Xaa is Tyr or Val
  VARIANT 104: note = Xaa is Gln or Ser
  VARIANT 109: note = Xaa is Gln or Ser
  VARIANT 111: note = Xaa is Tyr or Val
  VARIANT 112: note = Xaa is Gln or Ser
  VARIANT 117: note = Xaa is Gln or Ser
  VARIANT 119: note = Xaa is Tyr or Val
  VARIANT 120: note = Xaa is Gln or Ser
  VARIANT 125: note = Xaa is Gln or Ser
  VARIANT 127: note = Xaa is Tyr or Val
  VARIANT 128: note = Xaa is Gln or Ser
  VARIANT 133: note = Xaa is Gln or Ser
  VARIANT 135: note = Xaa is Tyr or Val
  VARIANT 136: note = Xaa is Gln or Ser
  VARIANT 141: note = Xaa is Gln or Ser
  VARIANT 143: note = Xaa is Tyr or Val
  VARIANT 144: note = Xaa is Gln or Ser
  VARIANT 149: note = Xaa is Gln or Ser
  VARIANT 151: note = Xaa is Tyr or Val
  VARIANT 152: note = Xaa is Gln or Ser
  VARIANT 157: note = Xaa is Gln or Ser
  VARIANT 159: note = Xaa is Tyr or Val
  VARIANT 160: note = Xaa is Gln or Ser
  VARIANT 165: note = Xaa is Gln or Ser
  VARIANT 167: note = Xaa is Tyr or Val
  VARIANT 168: note = Xaa is Gln or Ser
  VARIANT 173: note = Xaa is Gln or Ser
  VARIANT 175: note = Xaa is Tyr or Val
  VARIANT 176: note = Xaa is Gln or Ser
  VARIANT 181: note = Xaa is Gln or Ser
  VARIANT 183: note = Xaa is Tyr or Val
  VARIANT 184: note = Xaa is Gln or Ser
  VARIANT 189: note = Xaa is Gln or Ser
  VARIANT 191: note = Xaa is Tyr or Val
  VARIANT 192: note = Xaa is Gln or Ser
  VARIANT 197: note = Xaa is Gln or Ser
  VARIANT 199: note = Xaa is Tyr or Val
  VARIANT 200: note = Xaa is Gln or Ser
  VARIANT 205: note = Xaa is Gln or Ser
  VARIANT 207: note = Xaa is Tyr or Val
  VARIANT 208: note = Xaa is Gln or Ser
  VARIANT 213: note = Xaa is Gln or Ser
  VARIANT 215: note = Xaa is Tyr or Val
  VARIANT 216: note = Xaa is Gln or Ser
  VARIANT 221: note = Xaa is Gln or Ser
  VARIANT 223: note = Xaa is Tyr or Val
  VARIANT 224: note = Xaa is Gln or Ser
  VARIANT 229: note = Xaa is Gln or Ser
  VARIANT 231: note = Xaa is Tyr or Val
  VARIANT 232: note = Xaa is Gln or Ser
  VARIANT 237: note = Xaa is Gln or Ser
  VARIANT 239: note = Xaa is Tyr or Val
  VARIANT 240: note = Xaa is Gln or Ser
  VARIANT 245: note = Xaa is Gln or Ser
  VARIANT 247: note = Xaa is Tyr or Val
  VARIANT 248: note = Xaa is Gln or Ser
  VARIANT 253: note = Xaa is Gln or Ser
  VARIANT 255: note = Xaa is Tyr or Val
  VARIANT 256: note = Xaa is Gln or Ser
  VARIANT 261: note = Xaa is Gln or Ser
  VARIANT 263: note = Xaa is Tyr or Val
  VARIANT 264: note = Xaa is Gln or Ser
  VARIANT 269: note = Xaa is Gln or Ser
  VARIANT 271: note = Xaa is Tyr or Val
  VARIANT 272: note = Xaa is Gln or Ser
  VARIANT 277: note = Xaa is Gln or Ser
  VARIANT 279: note = Xaa is Tyr or Val
  VARIANT 280: note = Xaa is Gln or Ser
  VARIANT 285: note = Xaa is Gln or Ser
  VARIANT 287: note = Xaa is Tyr or Val
  VARIANT 288: note = Xaa is Gln or Ser
  VARIANT 293: note = Xaa is Gln or Ser
  VARIANT 295: note = Xaa is Tyr or Val
  VARIANT 296: note = Xaa is Gln or Ser
  VARIANT 301: note = Xaa is Gln or Ser
  VARIANT 303: note = Xaa is Tyr or Val
  VARIANT 304: note = Xaa is Gln or Ser
  VARIANT 309: note = Xaa is Gln or Ser
  VARIANT 311: note = Xaa is Tyr or Val
  VARIANT 312: note = Xaa is Gln or Ser
  VARIANT 317: note = Xaa is Gln or Ser
  VARIANT 319: note = Xaa is Tyr or Val
  VARIANT 320: note = Xaa is Gln or Ser
  VARIANT 325: note = Xaa is Gln or Ser
  VARIANT 327: note = Xaa is Tyr or Val
  VARIANT 328: note = Xaa is Gln or Ser
  VARIANT 333: note = Xaa is Gln or Ser
  VARIANT 335: note = Xaa is Tyr or Val
  VARIANT 336: note = Xaa is Gln or Ser
  VARIANT 341: note = Xaa is Gln or Ser
  VARIANT 343: note = Xaa is Tyr or Val
  VARIANT 344: note = Xaa is Gln or Ser
  VARIANT 349: note = Xaa is Gln or Ser
  VARIANT 351: note = Xaa is Tyr or Val
  VARIANT 352: note = Xaa is Gln or Ser
  VARIANT 357: note = Xaa is Gln or Ser
  VARIANT 359: note = Xaa is Tyr or Val
  VARIANT 360: note = Xaa is Gln or Ser
  VARIANT 365: note = Xaa is Gln or Ser
  VARIANT 367: note = Xaa is Tyr or Val
  VARIANT 368: note = Xaa is Gln or Ser
  VARIANT 373: note = Xaa is Gln or Ser
  VARIANT 375: note = Xaa is Tyr or Val
  VARIANT 376: note = Xaa is Gln or Ser
  VARIANT 381: note = Xaa is Gln or Ser
  VARIANT 383: note = Xaa is Tyr or Val
  VARIANT 384: note = Xaa is Gln or Ser
  VARIANT 389: note = Xaa is Gln or Ser
  VARIANT 391: note = Xaa is Tyr or Val
  VARIANT 392: note = Xaa is Gln or Ser
  VARIANT 397: note = Xaa is Gln or Ser
  VARIANT 399: note = Xaa is Tyr or Val
  VARIANT 400: note = Xaa is Gln or Ser
  VARIANT 405: note = Xaa is Gln or Ser
  VARIANT 407: note = Xaa is Tyr or Val
  VARIANT 408: note = Xaa is Gln or Ser
  VARIANT 413: note = Xaa is Gln or Ser
  VARIANT 415: note = Xaa is Tyr or Val
  VARIANT 416: note = Xaa is Gln or Ser
  VARIANT 421: note = Xaa is Gln or Ser
  VARIANT 423: note = Xaa is Tyr or Val
  VARIANT 424: note = Xaa is Gln or Ser
  VARIANT 429: note = Xaa is Gln or Ser
  VARIANT 431: note = Xaa is Tyr or Val
  VARIANT 432: note = Xaa is Gln or Ser
  VARIANT 437: note = Xaa is Gln or Ser
  VARIANT 439: note = Xaa is Tyr or Val
  VARIANT 440: note = Xaa is Gln or Ser
  VARIANT 445: note = Xaa is Gln or Ser
  VARIANT 447: note = Xaa is Tyr or Val
  VARIANT 448: note = Xaa is Gln or Ser
  VARIANT 453: note = Xaa is Gln or Ser
  VARIANT 455: note = Xaa is Tyr or Val
  VARIANT 456: note = Xaa is Gln or Ser
  VARIANT 461: note = Xaa is Gln or Ser
  VARIANT 463: note = Xaa is Tyr or Val
  VARIANT 464: note = Xaa is Gln or Ser
  VARIANT 469: note = Xaa is Gln or Ser
  VARIANT 471: note = Xaa is Tyr or Val
  VARIANT 472: note = Xaa is Gln or Ser
  VARIANT 477: note = Xaa is Gln or Ser
  VARIANT 479: note = Xaa is Tyr or Val
  VARIANT 480: note = Xaa is Gln or Ser
  VARIANT 485: note = Xaa is Gln or Ser
  VARIANT 487: note = Xaa is Tyr or Val
  VARIANT 488: note = Xaa is Gln or Ser
  VARIANT 493: note = Xaa is Gln or Ser
  VARIANT 495: note = Xaa is Tyr or Val
  VARIANT 496: note = Xaa is Gln or Ser
  VARIANT 501: note = Xaa is Gln or Ser
  VARIANT 503: note = Xaa is Tyr or Val
  VARIANT 504: note = Xaa is Gln or Ser
  VARIANT 509: note = Xaa is Gln or Ser
  VARIANT 511: note = Xaa is Tyr or Val
  VARIANT 512: note = Xaa is Gln or Ser
  VARIANT 517: note = Xaa is Gln or Ser
  VARIANT 519: note = Xaa is Tyr or Val
  VARIANT 520: note = Xaa is Gln or Ser
  VARIANT 525: note = Xaa is Gln or Ser
  VARIANT 527: note = Xaa is Tyr or Val
  VARIANT 528: note = Xaa is Gln or Ser
  VARIANT 533: note = Xaa is Gln or Ser
  VARIANT 535: note = Xaa is Tyr or Val
  VARIANT 536: note = Xaa is Gln or Ser
  VARIANT 541: note = Xaa is Gln or Ser
  VARIANT 543: note = Xaa is Tyr or Val
  VARIANT 544: note = Xaa is Gln or Ser
  VARIANT 549: note = Xaa is Gln or Ser
  VARIANT 551: note = Xaa is Tyr or Val
  VARIANT 552: note = Xaa is Gln or Ser
  VARIANT 557: note = Xaa is Gln or Ser
  VARIANT 559: note = Xaa is Tyr or Val
  VARIANT 560: note = Xaa is Gln or Ser
  VARIANT 565: note = Xaa is Gln or Ser
  VARIANT 567: note = Xaa is Tyr or Val
  VARIANT 568: note = Xaa is Gln or Ser
  VARIANT 573: note = Xaa is Gln or Ser
  VARIANT 575: note = Xaa is Tyr or Val
  VARIANT 576: note = Xaa is Gln or Ser
  VARIANT 581: note = Xaa is Gln or Ser
  VARIANT 583: note = Xaa is Tyr or Val
  VARIANT 584: note = Xaa is Gln or Ser
  VARIANT 589: note = Xaa is Gln or Ser
  VARIANT 591: note = Xaa is Tyr or Val
  VARIANT 592: note = Xaa is Gln or Ser
  VARIANT 597: note = Xaa is Gln or Ser
  VARIANT 599: note = Xaa is Tyr or Val
  VARIANT 600: note = Xaa is Gln or Ser
  VARIANT 605: note = Xaa is Gln or Ser
  VARIANT 607: note = Xaa is Tyr or Val
  VARIANT 608: note = Xaa is Gln or Ser
  VARIANT 613: note = Xaa is Gln or Ser
  VARIANT 615: note = Xaa is Tyr or Val
  VARIANT 616: note = Xaa is Gln or Ser
  VARIANT 621: note = Xaa is Gln or Ser
  VARIANT 623: note = Xaa is Tyr or Val
  VARIANT 624: note = Xaa is Gln or Ser
  VARIANT 629: note = Xaa is Gln or Ser
  VARIANT 631: note = Xaa is Tyr or Val
  VARIANT 632: note = Xaa is Gln or Ser
  VARIANT 637: note = Xaa is Gln or Ser
  VARIANT 639: note = Xaa is Tyr or Val
  VARIANT 640: note = Xaa is Gln or Ser
  VARIANT 645: note = Xaa is Gln or Ser
  VARIANT 647: note = Xaa is Tyr or Val
  VARIANT 648: note = Xaa is Gln or Ser
  VARIANT 653: note = Xaa is Gln or Ser
  VARIANT 655: note = Xaa is Tyr or Val
  VARIANT 656: note = Xaa is Gln or Ser
  VARIANT 661: note = Xaa is Gln or Ser
  VARIANT 663: note = Xaa is Tyr or Val
  VARIANT 664: note = Xaa is Gln or Ser
  VARIANT 669: note = Xaa is Gln or Ser
  VARIANT 671: note = Xaa is Tyr or Val
  VARIANT 672: note = Xaa is Gln or Ser
  VARIANT 677: note = Xaa is Gln or Ser
  VARIANT 679: note = Xaa is Tyr or Val
  VARIANT 680: note = Xaa is Gln or Ser
  VARIANT 685: note = Xaa is Gln or Ser
  VARIANT 687: note = Xaa is Tyr or Val
  VARIANT 688: note = Xaa is Gln or Ser
  VARIANT 693: note = Xaa is Gln or Ser
  VARIANT 695: note = Xaa is Tyr or Val
  VARIANT 696: note = Xaa is Gln or Ser
  VARIANT 701: note = Xaa is Gln or Ser
  VARIANT 703: note = Xaa is Tyr or Val
  VARIANT 704: note = Xaa is Gln or Ser
  VARIANT 709: note = Xaa is Gln or Ser
  VARIANT 711: note = Xaa is Tyr or Val
  VARIANT 712: note = Xaa is Gln or Ser
  VARIANT 717: note = Xaa is Gln or Ser
  VARIANT 719: note = Xaa is Tyr or Val
  VARIANT 720: note = Xaa is Gln or Ser
  VARIANT 725: note = Xaa is Gln or Ser
  VARIANT 727: note = Xaa is Tyr or Val
  VARIANT 728: note = Xaa is Gln or Ser
  VARIANT 733: note = Xaa is Gln or Ser
  VARIANT 735: note = Xaa is Tyr or Val
  VARIANT 736: note = Xaa is Gln or Ser
  VARIANT 741: note = Xaa is Gln or Ser
  VARIANT 743: note = Xaa is Tyr or Val
  VARIANT 744: note = Xaa is Gln or Ser
  VARIANT 749: note = Xaa is Gln or Ser
  VARIANT 751: note = Xaa is Tyr or Val
  VARIANT 752: note = Xaa is Gln or Ser
  VARIANT 757: note = Xaa is Gln or Ser
  VARIANT 759: note = Xaa is Tyr or Val
  VARIANT 760: note = Xaa is Gln or Ser
  VARIANT 765: note = Xaa is Gln or Ser
  VARIANT 767: note = Xaa is Tyr or Val
  VARIANT 768: note = Xaa is Gln or Ser
  VARIANT 773: note = Xaa is Gln or Ser
  VARIANT 775: note = Xaa is Tyr or Val
  VARIANT 776: note = Xaa is Gln or Ser
  VARIANT 781: note = Xaa is Gln or Ser
  VARIANT 783: note = Xaa is Tyr or Val
  VARIANT 784: note = Xaa is Gln or Ser
  VARIANT 789: note = Xaa is Gln or Ser
  VARIANT 791: note = Xaa is Tyr or Val
  VARIANT 792: note = Xaa is Gln or Ser
  VARIANT 797: note = Xaa is Gln or Ser
  VARIANT 799: note = Xaa is Tyr or Val
  VARIANT 800: note = Xaa is Gln or Ser
  VARIANT 805: note = Xaa is Gln or Ser
  VARIANT 807: note = Xaa is Tyr or Val
  VARIANT 808: note = Xaa is Gln or Ser
  VARIANT 813: note = Xaa is Gln or Ser
  VARIANT 815: note = Xaa is Tyr or Val
  VARIANT 816: note = Xaa is Gln or Ser
  VARIANT 821: note = Xaa is Gln or Ser
  VARIANT 823: note = Xaa is Tyr or Val
  VARIANT 824: note = Xaa is Gln or Ser
  VARIANT 829: note = Xaa is Gln or Ser
  VARIANT 831: note = Xaa is Tyr or Val
  VARIANT 832: note = Xaa is Gln or Ser
  VARIANT 837: note = Xaa is Gln or Ser
  VARIANT 839: note = Xaa is Tyr or Val
  VARIANT 840: note = Xaa is Gln or Ser
  VARIANT 845: note = Xaa is Gln or Ser
  VARIANT 847: note = Xaa is Tyr or Val
  VARIANT 848: note = Xaa is Gln or Ser
  VARIANT 853: note = Xaa is Gln or Ser
  VARIANT 855: note = Xaa is Tyr or Val
  VARIANT 856: note = Xaa is Gln or Ser
  VARIANT 861: note = Xaa is Gln or Ser
  VARIANT 863: note = Xaa is Tyr or Val
  VARIANT 864: note = Xaa is Gln or Ser
  VARIANT 869: note = Xaa is Gln or Ser
  VARIANT 871: note = Xaa is Tyr or Val
  VARIANT 872: note = Xaa is Gln or Ser
  VARIANT 877: note = Xaa is Gln or Ser
  VARIANT 879: note = Xaa is Tyr or Val
  VARIANT 880: note = Xaa is Gln or Ser
  VARIANT 885: note = Xaa is Gln or Ser
  VARIANT 887: note = Xaa is Tyr or Val
  VARIANT 888: note = Xaa is Gln or Ser
  VARIANT 893: note = Xaa is Gln or Ser
  VARIANT 895: note = Xaa is Tyr or Val
  VARIANT 896: note = Xaa is Gln or Ser
  VARIANT 901: note = Xaa is Gln or Ser
  VARIANT 903: note = Xaa is Tyr or Val
  VARIANT 904: note = Xaa is Gln or Ser
  VARIANT 909: note = Xaa is Gln or Ser
  VARIANT 911: note = Xaa is Tyr or Val
  VARIANT 912: note = Xaa is Gln or Ser
  VARIANT 917: note = Xaa is Gln or Ser
  VARIANT 919: note = Xaa is Tyr or Val
  VARIANT 920: note = Xaa is Gln or Ser
  VARIANT 925: note = Xaa is Gln or Ser
  VARIANT 927: note = Xaa is Tyr or Val
  VARIANT 928: note = Xaa is Gln or Ser
  VARIANT 933: note = Xaa is Gln or Ser
  VARIANT 935: note = Xaa is Tyr or Val
  VARIANT 936: note = Xaa is Gln or Ser
  VARIANT 941: note = Xaa is Gln or Ser
  VARIANT 943: note = Xaa is Tyr or Val
  VARIANT 944: note = Xaa is Gln or Ser
  VARIANT 949: note = Xaa is Gln or Ser
  VARIANT 951: note = Xaa is Tyr or Val
  VARIANT 952: note = Xaa is Gln or Ser
  VARIANT 957: note = Xaa is Gln or Ser
  VARIANT 959: note = Xaa is Tyr or Val
  VARIANT 960: note = Xaa is Gln or Ser
  VARIANT 965: note = Xaa is Gln or Ser
  VARIANT 967: note = Xaa is Tyr or Val
  VARIANT 968: note = Xaa is Gln or Ser
  VARIANT 973: note = Xaa is Gln or Ser
  VARIANT 975: note = Xaa is Tyr or Val
  VARIANT 976: note = Xaa is Gln or Ser
  VARIANT 981: note = Xaa is Gln or Ser
  VARIANT 983: note = Xaa is Tyr or Val
  VARIANT 984: note = Xaa is Gln or Ser
  VARIANT 989: note = Xaa is Gln or Ser
  VARIANT 991: note = Xaa is Tyr or Val
  VARIANT 992: note = Xaa is Gln or Ser
  VARIANT 997: note = Xaa is Gln or Ser
  VARIANT 999: note = Xaa is Tyr or Val
  VARIANT 1000: note = Xaa is Gln or Ser
  VARIANT 1005: note = Xaa is Gln or Ser
  VARIANT 1007: note = Xaa is Tyr or Val
  VARIANT 1008: note = Xaa is Gln or Ser
  VARIANT 1013: note = Xaa is Gln or Ser
  VARIANT 1015: note = Xaa is Tyr or Val
  VARIANT 1016: note = Xaa is Gln or Ser
  VARIANT 1021: note = Xaa is Gln or Ser
  VARIANT 1023: note = Xaa is Tyr or Val
  VARIANT 1024: note = Xaa is Gln or Ser
  VARIANT 1029: note = Xaa is Gln or Ser
  VARIANT 1031: note = Xaa is Tyr or Val
  VARIANT 1032: note = Xaa is Gln or Ser
  VARIANT 1037: note = Xaa is Gln or Ser
  VARIANT 1039: note = Xaa is Tyr or Val
  VARIANT 1040: note = Xaa is Gln or Ser
  VARIANT 1045: note = Xaa is Gln or Ser
  VARIANT 1047: note = Xaa is Tyr or Val
  VARIANT 1048: note = Xaa is Gln or Ser
  VARIANT 1053: note = Xaa is Gln or Ser
  VARIANT 1055: note = Xaa is Tyr or Val
  VARIANT 1056: note = Xaa is Gln or Ser
  VARIANT 1061: note = Xaa is Gln or Ser
  VARIANT 1063: note = Xaa is Tyr or Val
  VARIANT 1064: note = Xaa is Gln or Ser
  VARIANT 1069: note = Xaa is Gln or Ser
  VARIANT 1071: note = Xaa is Tyr or Val
  VARIANT 1072: note = Xaa is Gln or Ser
  VARIANT 1077: note = Xaa is Gln or Ser
  VARIANT 1079: note = Xaa is Tyr or Val
  VARIANT 1080: note = Xaa is Gln or Ser
  VARIANT 1085: note = Xaa is Gln or Ser
  VARIANT 1087: note = Xaa is Tyr or Val
  VARIANT 1088: note = Xaa is Gln or Ser
  VARIANT 1093: note = Xaa is Gln or Ser
  VARIANT 1095: note = Xaa is Tyr or Val
  VARIANT 1096: note = Xaa is Gln or Ser
  VARIANT 1101: note = Xaa is Gln or Ser
  VARIANT 1103: note = Xaa is Tyr or Val
  VARIANT 1104: note = Xaa is Gln or Ser
  VARIANT 1109: note = Xaa is Gln or Ser
  VARIANT 1111: note = Xaa is Tyr or Val
  VARIANT 1112: note = Xaa is Gln or Ser
  VARIANT 1117: note = Xaa is Gln or Ser
  VARIANT 1119: note = Xaa is Tyr or Val
  VARIANT 1120: note = Xaa is Gln or Ser
  VARIANT 1125: note = Xaa is Gln or Ser
  VARIANT 1127: note = Xaa is Tyr or Val
  VARIANT 1128: note = Xaa is Gln or Ser
  VARIANT 1133: note = Xaa is Gln or Ser
  VARIANT 1135: note = Xaa is Tyr or Val
  VARIANT 1136: note = Xaa is Gln or Ser
  VARIANT 1141: note = Xaa is Gln or Ser
  VARIANT 1143: note = Xaa is Tyr or Val
  VARIANT 1144: note = Xaa is Gln or Ser
  VARIANT 1149: note = Xaa is Gln or Ser
  VARIANT 1151: note = Xaa is Tyr or Val
  VARIANT 1152: note = Xaa is Gln or Ser
  VARIANT 1157: note = Xaa is Gln or Ser
  VARIANT 1159: note = Xaa is Tyr or Val
  VARIANT 1160: note = Xaa is Gln or Ser
  VARIANT 1165: note = Xaa is Gln or Ser
  VARIANT 1167: note = Xaa is Tyr or Val
  VARIANT 1168: note = Xaa is Gln or Ser
  VARIANT 1173: note = Xaa is Gln or Ser
  VARIANT 1175: note = Xaa is Tyr or Val
  VARIANT 1176: note = Xaa is Gln or Ser
  VARIANT 1181: note = Xaa is Gln or Ser
  VARIANT 1183: note = Xaa is Tyr or Val
  VARIANT 1184: note = Xaa is Gln or Ser
  VARIANT 1189: note = Xaa is Gln or Ser
  VARIANT 1191: note = Xaa is Tyr or Val
  VARIANT 1192: note = Xaa is Gln or Ser
  VARIANT 1197: note = Xaa is Gln or Ser
  VARIANT 1199: note = Xaa is Tyr or Val
  VARIANT 1200: note = Xaa is Gln or Ser
  VARIANT 1205: note = Xaa is Gln or Ser
  VARIANT 1207: note = Xaa is Tyr or Val
  VARIANT 1208: note = Xaa is Gln or Ser
  VARIANT 1213: note = Xaa is Gln or Ser
  VARIANT 1215: note = Xaa is Tyr or Val
  VARIANT 1216: note = Xaa is Gln or Ser
  VARIANT 1221: note = Xaa is Gln or Ser
  VARIANT 1223: note = Xaa is Tyr or Val
  VARIANT 1224: note = Xaa is Gln or Ser
  VARIANT 1229: note = Xaa is Gln or Ser
  VARIANT 1231: note = Xaa is Tyr or Val
  VARIANT 1232: note = Xaa is Gln or Ser
  VARIANT 1237: note = Xaa is Gln or Ser
  VARIANT 1239: note = Xaa is Tyr or Val
  VARIANT 1240: note = Xaa is Gln or Ser
  VARIANT 1245: note = Xaa is Gln or Ser
  VARIANT 1247: note = Xaa is Tyr or Val
  VARIANT 1248: note = Xaa is Gln or Ser
  VARIANT 1253: note = Xaa is Gln or Ser
  VARIANT 1255: note = Xaa is Tyr or Val
  VARIANT 1256: note = Xaa is Gln or Ser
  VARIANT 1261: note = Xaa is Gln or Ser
  VARIANT 1263: note = Xaa is Tyr or Val
  VARIANT 1264: note = Xaa is Gln or Ser
  VARIANT 1269: note = Xaa is Gln or Ser
  VARIANT 1271: note = Xaa is Tyr or Val
  VARIANT 1272: note = Xaa is Gln or Ser
  VARIANT 1277: note = Xaa is Gln or Ser
  VARIANT 1279: note = Xaa is Tyr or Val
  VARIANT 1280: note = Xaa is Gln or Ser
GRGDXPXXGRGDXPXXGRGDXPXXGRGDXPXXGRGDXPXXGRGDXPXXGRGDXPXXGRGDXPXXGRGDXPXXGRGDXPXXGRGDXPXXGRGDXPXXGRGDXPXXGRGDXPXXGRGDXPXXGRGDXPXXGRGDXPXXGRGDXPXXGRGDXPXXGRGDXPXXGRGDXPXXGRGDXPXXGRGDXPXXGRGDXPXXGRGDXPXXGRGDXPXXGRGDXPXXGRGDXPXXGRGDXPXXGRGDXPXXGRGDXPXXGRGDXPXXGRGDXPXXGRGDXPXXGRGDXPXXGRGDXPXXGRGDXPXXGRGDXPXXGRGDXPXXGRGDXPXXGRGDXPXXGRGDXPXXGRGDXPXXGRGDXPXXGRGDXPXXGRGDXPXXGRGDXPXXGRGDXPXXGRGDXPXXGRGDXPXXGRGDXPXXGRGDXPXXGRGDXPXXGRGDXPXXGRGDXPXXGRGDXPXXGRGDXPXXGRGDXPXXGRGDXPXXGRGDXPXXGRGDXPXXGRGDXPXXGRGDXPXXGRGDXPXXGRGDXPXXGRGDXPXXGRGDXPXXGRGDXPXXGRGDXPXXGRGDXPXXGRGDXPXXGRGDXPXXGRGDXPXXGRGDXPXXGRGDXPXXGRGDXPXXGRGDXPXXGRGDXPXXGRGDXPXXGRGDXPXXGRGDXPXXGRGDXPXXGRGDXPXXGRGDXPXXGRGDXPXXGRGDXPXXGRGDXPXXGRGDXPXXGRGDXPXXGRGDXPXXGRGDXPXXGRGDXPXXGRGDXPXXGRGDXPXXGRGDXPXXGRGDXPXXGRGDXPXXGRGDXPXXGRGDXPXXGRGDXPXXGRGDXPXXGRGDXPXXGRGDXPXXGRGDXPXXGRGDXPXXGRGDXPXXGRGDXPXXGRGDXPXXGRGDXPXXGRGDXPXXGRGDXPXXGRGDXPXXGRGDXPXXGRGDXPXXGRGDXPXXGRGDXPXXGRGDXPXXGRGDXPXXGRGDXPXXGRGDXPXXGRGDXPXXGRGDXPXXGRGDXPXXGRGDXPXXGRGDXPXXGRGDXPXXGRGDXPXXGRGDXPXXGRGDXPXXGRGDXPXXGRGDXPXXGRGDXPXXGRGDXPXXGRGDXPXXGRGDXPXXGRGDXPXXGRGDXPXXGRGDXPXXGRGDXPXXGRGDXPXXGRGDXPXXGRGDXPXXGRGDXPXXGRGDXPXXGRGDXPXXGRGDXPXXGRGDXPXXGRGDXPXXGRGDXPXXGRGDXPXXGRGDXPXXGRGDXPXXGRGDXPXXGRGDXPXXGRGDXPXXGRGDXPXXGRGDXPXXGRGDXPXXGRGDXPXXGRGDXPXX

SEQ ID NO: 153 - protein, 1280 aa, synthetic construct
  REGION 1..1280: note = elastin-like polypeptide
  VARIANT 1: note = Xaa is Gln or Ser
  VARIANT 2: note = Xaa is Tyr or Val
  VARIANT 4: note = Xaa is Gln or Ser
  VARIANT 9: note = Xaa is Gln or Ser
  VARIANT 10: note = Xaa is Tyr or Val
  VARIANT 12: note = Xaa is Gln or Ser
  VARIANT 17: note = Xaa is Gln or Ser
  VARIANT 18: note = Xaa is Tyr or Val
  VARIANT 20: note = Xaa is Gln or Ser
  VARIANT 25: note = Xaa is Gln or Ser
  VARIANT 26: note = Xaa is Tyr or Val
  VARIANT 28: note = Xaa is Gln or Ser
  VARIANT 33: note = Xaa is Gln or Ser
  VARIANT 34: note = Xaa is Tyr or Val
  VARIANT 36: note = Xaa is Gln or Ser
  VARIANT 41: note = Xaa is Gln or Ser
  VARIANT 42: note = Xaa is Tyr or Val
  VARIANT 44: note = Xaa is Gln or Ser
  VARIANT 49: note = Xaa is Gln or Ser
  VARIANT 50: note = Xaa is Tyr or Val
  VARIANT 52: note = Xaa is Gln or Ser
  VARIANT 57: note = Xaa is Gln or Ser
  VARIANT 58: note = Xaa is Tyr or Val
  VARIANT 60: note = Xaa is Gln or Ser
  VARIANT 65: note = Xaa is Gln or Ser
  VARIANT 66: note = Xaa is Tyr or Val
  VARIANT 68: note = Xaa is Gln or Ser
  VARIANT 73: note = Xaa is Gln or Ser
  VARIANT 74: note = Xaa is Tyr or Val
  VARIANT 76: note = Xaa is Gln or Ser
  VARIANT 81..1280: note = May be present or absent in groups of the repeat unit Xaa Xaa ProXaa Asp Gly Arg Gly
  VARIANT 81: note = Xaa is Gln or Ser
  VARIANT 82: note = Xaa is Tyr or Val
  VARIANT 84: note = Xaa is Gln or Ser
  VARIANT 89: note = Xaa is Gln or Ser
  VARIANT 90: note = Xaa is Tyr or Val
  VARIANT 92: note = Xaa is Gln or Ser
  VARIANT 97: note = Xaa is Gln or Ser
  VARIANT 98: note = Xaa is Tyr or Val
  VARIANT 100: note = Xaa is Gln or Ser
  VARIANT 105: note = Xaa is Gln or Ser
  VARIANT 106: note = Xaa is Tyr or Val
  VARIANT 108: note = Xaa is Gln or Ser
  VARIANT 113: note = Xaa is Gln or Ser
  VARIANT 114: note = Xaa is Tyr or Val
  VARIANT 116: note = Xaa is Gln or Ser
  VARIANT 121: note = Xaa is Gln or Ser
  VARIANT 122: note = Xaa is Tyr or Val
  VARIANT 124: note = Xaa is Gln or Ser
  VARIANT 129: note = Xaa is Gln or Ser
  VARIANT 130: note = Xaa is Tyr or Val
  VARIANT 132: note = Xaa is Gln or Ser
  VARIANT 137: note = Xaa is Gln or Ser
  VARIANT 138: note = Xaa is Tyr or Val
  VARIANT 140: note = Xaa is Gln or Ser
  VARIANT 145: note = Xaa is Gln or Ser
  VARIANT 146: note = Xaa is Tyr or Val
  VARIANT 148: note = Xaa is Gln or Ser
  VARIANT 153: note = Xaa is Gln or Ser
  VARIANT 154: note = Xaa is Tyr or Val
  VARIANT 156: note = Xaa is Gln or Ser
  VARIANT 161: note = Xaa is Gln or Ser
  VARIANT 162: note = Xaa is Tyr or Val
  VARIANT 164: note = Xaa is Gln or Ser
  VARIANT 169: note = Xaa is Gln or Ser
  VARIANT 170: note = Xaa is Tyr or Val
  VARIANT 172: note = Xaa is Gln or Ser
  VARIANT 177: note = Xaa is Gln or Ser
  VARIANT 178: note = Xaa is Tyr or Val
  VARIANT 180: note = Xaa is Gln or Ser
  VARIANT 185: note = Xaa is Gln or Ser
  VARIANT 186: note = Xaa is Tyr or Val
  VARIANT 188: note = Xaa is Gln or Ser
  VARIANT 193: note = Xaa is Gln or Ser
  VARIANT 194: note = Xaa is Tyr or Val
  VARIANT 196: note = Xaa is Gln or Ser
  VARIANT 201: note = Xaa is Gln or Ser
  VARIANT 202: note = Xaa is Tyr or Val
  VARIANT 204: note = Xaa is Gln or Ser
  VARIANT 209: note = Xaa is Gln or Ser
  VARIANT 210: note = Xaa is Tyr or Val
  VARIANT 212: note = Xaa is Gln or Ser
  VARIANT 217: note = Xaa is Gln or Ser
  VARIANT 218: note = Xaa is Tyr or Val
  VARIANT 220: note = Xaa is Gln or Ser
  VARIANT 225: note = Xaa is Gln or Ser
  VARIANT 226: note = Xaa is Tyr or Val
  VARIANT 228: note = Xaa is Gln or Ser
  VARIANT 233: note = Xaa is Gln or Ser
  VARIANT 234: note = Xaa is Tyr or Val
  VARIANT 236: note = Xaa is Gln or Ser
  VARIANT 241: note = Xaa is Gln or Ser
  VARIANT 242: note = Xaa is Tyr or Val
  VARIANT 244: note = Xaa is Gln or Ser
  VARIANT 249: note = Xaa is Gln or Ser
  VARIANT 250: note = Xaa is Tyr or Val
  VARIANT 252: note = Xaa is Gln or Ser
  VARIANT 257: note = Xaa is Gln or Ser
  VARIANT 258: note = Xaa is Tyr or Val
  VARIANT 260: note = Xaa is Gln or Ser
  VARIANT 265: note = Xaa is Gln or Ser
  VARIANT 266: note = Xaa is Tyr or Val
  VARIANT 268: note = Xaa is Gln or Ser
  VARIANT 273: note = Xaa is Gln or Ser
  VARIANT 274: note = Xaa is Tyr or Val
  VARIANT 276: note = Xaa is Gln or Ser
  VARIANT 281: note = Xaa is Gln or Ser
  VARIANT 282: note = Xaa is Tyr or Val
  VARIANT 284: note = Xaa is Gln or Ser
  VARIANT 289: note = Xaa is Gln or Ser
  VARIANT 290: note = Xaa is Tyr or Val
  VARIANT 292: note = Xaa is Gln or Ser
  VARIANT 297: note = Xaa is Gln or Ser
  VARIANT 298: note = Xaa is Tyr or Val
  VARIANT 300: note = Xaa is Gln or Ser
  VARIANT 305: note = Xaa is Gln or Ser
  VARIANT 306: note = Xaa is Tyr or Val
  VARIANT 308: note = Xaa is Gln or Ser
  VARIANT 313: note = Xaa is Gln or Ser
  VARIANT 314: note = Xaa is Tyr or Val
  VARIANT 316: note = Xaa is Gln or Ser
  VARIANT 321: note = Xaa is Gln or Ser
  VARIANT 322: note = Xaa is Tyr or Val
  VARIANT 324: note = Xaa is Gln or Ser
  VARIANT 329: note = Xaa is Gln or Ser
  VARIANT 330: note = Xaa is Tyr or Val
  VARIANT 332: note = Xaa is Gln or Ser
  VARIANT 337: note = Xaa is Gln or Ser
  VARIANT 338: note = Xaa is Tyr or Val
  VARIANT 340: note = Xaa is Gln or Ser
  VARIANT 345: note = Xaa is Gln or Ser
  VARIANT 346: note = Xaa is Tyr or Val
  VARIANT 348: note = Xaa is Gln or Ser
  VARIANT 353: note = Xaa is Gln or Ser
  VARIANT 354: note = Xaa is Tyr or Val
  VARIANT 356: note = Xaa is Gln or Ser
  VARIANT 361: note = Xaa is Gln or Ser
  VARIANT 362: note = Xaa is Tyr or Val
  VARIANT 364: note = Xaa is Gln or Ser
  VARIANT 369: note = Xaa is Gln or Ser
  VARIANT 370: note = Xaa is Tyr or Val
  VARIANT 372: note = Xaa is Gln or Ser
  VARIANT 377: note = Xaa is Gln or Ser
  VARIANT 378: note = Xaa is Tyr or Val
  VARIANT 380: note = Xaa is Gln or Ser
  VARIANT 385: note = Xaa is Gln or Ser
  VARIANT 386: note = Xaa is Tyr or Val
  VARIANT 388: note = Xaa is Gln or Ser
  VARIANT 393: note = Xaa is Gln or Ser
  VARIANT 394: note = Xaa is Tyr or Val
  VARIANT 396: note = Xaa is Gln or Ser
  VARIANT 401: note = Xaa is Gln or Ser
  VARIANT 402: note = Xaa is Tyr or Val
  VARIANT 404: note = Xaa is Gln or Ser
  VARIANT 409: note = Xaa is Gln or Ser
  VARIANT 410: note = Xaa is Tyr or Val
  VARIANT 412: note = Xaa is Gln or Ser
  VARIANT 417: note = Xaa is Gln or Ser
  VARIANT 418: note = Xaa is Tyr or Val
  VARIANT 420: note = Xaa is Gln or Ser
  VARIANT 425: note = Xaa is Gln or Ser
  VARIANT 426: note = Xaa is Tyr or Val
  VARIANT 428: note = Xaa is Gln or Ser
  VARIANT 433: note = Xaa is Gln or Ser
  VARIANT 434: note = Xaa is Tyr or Val
  VARIANT 436: note = Xaa is Gln or Ser
  VARIANT 441: note = Xaa is Gln or Ser
  VARIANT 442: note = Xaa is Tyr or Val
  VARIANT 444: note = Xaa is Gln or Ser
  VARIANT 449: note = Xaa is Gln or Ser
  VARIANT 450: note = Xaa is Tyr or Val
  VARIANT 452: note = Xaa is Gln or Ser
  VARIANT 457: note = Xaa is Gln or Ser
  VARIANT 458: note = Xaa is Tyr or Val
  VARIANT 460: note = Xaa is Gln or Ser
  VARIANT 465: note = Xaa is Gln or Ser
  VARIANT 466: note = Xaa is Tyr or Val
  VARIANT 468: note = Xaa is Gln or Ser
  VARIANT 473: note = Xaa is Gln or Ser
  VARIANT 474: note = Xaa is Tyr or Val
  VARIANT 476: note = Xaa is Gln or Ser
  VARIANT 481: note = Xaa is Gln or Ser
  VARIANT 482: note = Xaa is Tyr or Val
  VARIANT 484: note = Xaa is Gln or Ser
  VARIANT 489: note = Xaa is Gln or Ser
  VARIANT 490: note = Xaa is Tyr or Val
  VARIANT 492: note = Xaa is Gln or Ser
  VARIANT 497: note = Xaa is Gln or Ser
  VARIANT 498: note = Xaa is Tyr or Val
  VARIANT 500: note = Xaa is Gln or Ser
  VARIANT 505: note = Xaa is Gln or Ser
  VARIANT 506: note = Xaa is Tyr or Val
  VARIANT 508: note = Xaa is Gln or Ser
  VARIANT 513: note = Xaa is Gln or Ser
  VARIANT 514: note = Xaa is Tyr or Val
  VARIANT 516: note = Xaa is Gln or Ser
  VARIANT 521: note = Xaa is Gln or Ser
  VARIANT 522: note = Xaa is Tyr or Val
  VARIANT 524: note = Xaa is Gln or Ser
  VARIANT 529: note = Xaa is Gln or Ser
  VARIANT 530: note = Xaa is Tyr or Val
  VARIANT 532: note = Xaa is Gln or Ser
  VARIANT 537: note = Xaa is Gln or Ser
  VARIANT 538: note = Xaa is Tyr or Val
  VARIANT 540: note = Xaa is Gln or Ser
  VARIANT 545: note = Xaa is Gln or Ser
  VARIANT 546: note = Xaa is Tyr or Val
  VARIANT 548: note = Xaa is Gln or Ser
  VARIANT 553: note = Xaa is Gln or Ser
  VARIANT 554: note = Xaa is Tyr or Val
  VARIANT 556: note = Xaa is Gln or Ser
  VARIANT 561: note = Xaa is Gln or Ser
  VARIANT 562: note = Xaa is Tyr or Val
  VARIANT 564: note = Xaa is Gln or Ser
  VARIANT 569: note = Xaa is Gln or Ser
  VARIANT 570: note = Xaa is Tyr or Val
  VARIANT 572: note = Xaa is Gln or Ser
  VARIANT 577: note = Xaa is Gln or Ser
  VARIANT 578: note = Xaa is Tyr or Val
  VARIANT 580: note = Xaa is Gln or Ser
  VARIANT 585: note = Xaa is Gln or Ser
  VARIANT 586: note = Xaa is Tyr or Val
  VARIANT 588: note = Xaa is Gln or Ser
  VARIANT 593: note = Xaa is Gln or Ser
  VARIANT 594: note = Xaa is Tyr or Val
  VARIANT 596: note = Xaa is Gln or Ser
  VARIANT 601: note = Xaa is Gln or Ser
  VARIANT 602: note = Xaa is Tyr or Val
  VARIANT 604: note = Xaa is Gln or Ser
  VARIANT 609: note = Xaa is Gln or Ser
  VARIANT 610: note = Xaa is Tyr or Val
  VARIANT 612: note = Xaa is Gln or Ser
  VARIANT 617: note = Xaa is Gln or Ser
  VARIANT 618: note = Xaa is Tyr or Val
  VARIANT 620: note = Xaa is Gln or Ser
  VARIANT 625: note = Xaa is Gln or Ser
  VARIANT 626: note = Xaa is Tyr or Val
  VARIANT 628: note = Xaa is Gln or Ser
  VARIANT 633: note = Xaa is Gln or Ser
  VARIANT 634: note = Xaa is Tyr or Val
  VARIANT 636: note = Xaa is Gln or Ser
  VARIANT 641: note = Xaa is Gln or Ser
  VARIANT 642: note = Xaa is Tyr or Val
  VARIANT 644: note = Xaa is Gln or Ser
  VARIANT 649: note = Xaa is Gln or Ser
  VARIANT 650: note = Xaa is Tyr or Val
  VARIANT 652: note = Xaa is Gln or Ser
  VARIANT 657: note = Xaa is Gln or Ser
  VARIANT 658: note = Xaa is Tyr or Val
  VARIANT 660: note = Xaa is Gln or Ser
  VARIANT 665: note = Xaa is Gln or Ser
  VARIANT 666: note = Xaa is Tyr or Val
  VARIANT 668: note = Xaa is Gln or Ser
  VARIANT 673: note = Xaa is Gln or Ser
  VARIANT 674: note = Xaa is Tyr or Val
  VARIANT 676: note = Xaa is Gln or Ser
  VARIANT 681: note = Xaa is Gln or Ser
  VARIANT 682: note = Xaa is Tyr or Val
  VARIANT 684: note = Xaa is Gln or Ser
  VARIANT 689: note = Xaa is Gln or Ser
  VARIANT 690: note = Xaa is Tyr or Val
  VARIANT 692: note = Xaa is Gln or Ser
  VARIANT 697: note = Xaa is Gln or Ser
  VARIANT 698: note = Xaa is Tyr or Val
  VARIANT 700: note = Xaa is Gln or Ser
  VARIANT 705: note = Xaa is Gln or Ser
  VARIANT 706: note = Xaa is Tyr or Val
  VARIANT 708: note = Xaa is Gln or Ser
  VARIANT 713: note = Xaa is Gln or Ser
  VARIANT 714: note = Xaa is Tyr or Val
  VARIANT 716: note = Xaa is Gln or Ser
  VARIANT 721: note = Xaa is Gln or Ser
  VARIANT 722: note = Xaa is Tyr or Val
  VARIANT 724: note = Xaa is Gln or Ser
  VARIANT 729: note = Xaa is Gln or Ser
  VARIANT 730: note = Xaa is Tyr or Val
  VARIANT 732: note = Xaa is Gln or Ser
  VARIANT 737: note = Xaa is Gln or Ser
  VARIANT 738: note = Xaa is Tyr or Val
  VARIANT 740: note = Xaa is Gln or Ser
  VARIANT 745: note = Xaa is Gln or Ser
  VARIANT 746: note = Xaa is Tyr or Val
  VARIANT 748: note = Xaa is Gln or Ser
  VARIANT 753: note = Xaa is Gln or Ser
  VARIANT 754: note = Xaa is Tyr or Val
  VARIANT 756: note = Xaa is Gln or Ser
  VARIANT 761: note = Xaa is Gln or Ser
  VARIANT 762: note = Xaa is Tyr or Val
  VARIANT 764: note = Xaa is Gln or Ser
  VARIANT 769: note = Xaa is Gln or Ser
  VARIANT 770: note = Xaa is Tyr or Val
  VARIANT 772: note = Xaa is Gln or Ser
  VARIANT 777: note = Xaa is Gln or Ser
  VARIANT 778: note = Xaa is Tyr or Val
  VARIANT 780: note = Xaa is Gln or Ser
  VARIANT 785: note = Xaa is Gln or Ser
  VARIANT 786: note = Xaa is Tyr or Val
  VARIANT 788: note = Xaa is Gln or Ser
  VARIANT 793: note = Xaa is Gln or Ser
  VARIANT 794: note = Xaa is Tyr or Val
  VARIANT 796: note = Xaa is Gln or Ser
  VARIANT 801: note = Xaa is Gln or Ser
  VARIANT 802: note = Xaa is Tyr or Val
  VARIANT 804: note = Xaa is Gln or Ser
  VARIANT 809: note = Xaa is Gln or Ser
  VARIANT 810: note = Xaa is Tyr or Val
  VARIANT 812: note = Xaa is Gln or Ser
  VARIANT 817: note = Xaa is Gln or Ser
  VARIANT 818: note = Xaa is Tyr or Val
  VARIANT 820: note = Xaa is Gln or Ser
  VARIANT 825: note = Xaa is Gln or Ser
  VARIANT 826: note = Xaa is Tyr or Val
  VARIANT 828: note = Xaa is Gln or Ser
  VARIANT 833: note = Xaa is Gln or Ser
  VARIANT 834: note = Xaa is Tyr or Val
  VARIANT 836: note = Xaa is Gln or Ser
  VARIANT 841: note = Xaa is Gln or Ser
  VARIANT 842: note = Xaa is Tyr or Val
  VARIANT 844: note = Xaa is Gln or Ser
  VARIANT 849: note = Xaa is Gln or Ser
  VARIANT 850: note = Xaa is Tyr or Val
  VARIANT 852: note = Xaa is Gln or Ser
  VARIANT 857: note = Xaa is Gln or Ser
  VARIANT 858: note = Xaa is Tyr or Val
  VARIANT 860: note = Xaa is Gln or Ser
  VARIANT 865: note = Xaa is Gln or Ser
  VARIANT 866: note = Xaa is Tyr or Val
  VARIANT 868: note = Xaa is Gln or Ser
  VARIANT 873: note = Xaa is Gln or Ser
  VARIANT 874: note = Xaa is Tyr or Val
  VARIANT 876: note = Xaa is Gln or Ser
  VARIANT 881: note = Xaa is Gln or Ser
  VARIANT 882: note = Xaa is Tyr or Val
  VARIANT 884: note = Xaa is Gln or Ser
  VARIANT 889: note = Xaa is Gln or Ser
  VARIANT 890: note = Xaa is Tyr or Val
  VARIANT 892: note = Xaa is Gln or Ser
  VARIANT 897: note = Xaa is Gln or Ser
  VARIANT 898: note = Xaa is Tyr or Val
  VARIANT 900: note = Xaa is Gln or Ser
  VARIANT 905: note = Xaa is Gln or Ser
  VARIANT 906: note = Xaa is Tyr or Val
  VARIANT 908: note = Xaa is Gln or Ser
  VARIANT 913: note = Xaa is Gln or Ser
  VARIANT 914: note = Xaa is Tyr or Val
  VARIANT 916: note = Xaa is Gln or Ser
  VARIANT 921: note = Xaa is Gln or Ser
  VARIANT 922: note = Xaa is Tyr or Val
  VARIANT 924: note = Xaa is Gln or Ser
  VARIANT 929: note = Xaa is Gln or Ser
  VARIANT 930: note = Xaa is Tyr or Val
  VARIANT 932: note = Xaa is Gln or Ser
  VARIANT 937: note = Xaa is Gln or Ser
  VARIANT 938: note = Xaa is Tyr or Val
  VARIANT 940: note = Xaa is Gln or Ser
  VARIANT 945: note = Xaa is Gln or Ser
  VARIANT 946: note = Xaa is Tyr or Val
  VARIANT 948: note = Xaa is Gln or Ser
  VARIANT 953: note = Xaa is Gln or Ser
  VARIANT 954: note = Xaa is Tyr or Val
  VARIANT 956: note = Xaa is Gln or Ser
  VARIANT 961: note = Xaa is Gln or Ser
  VARIANT 962: note = Xaa is Tyr or Val
  VARIANT 964: note = Xaa is Gln or Ser
  VARIANT 969: note = Xaa is Gln or Ser
  VARIANT 970: note = Xaa is Tyr or Val
  VARIANT 972: note = Xaa is Gln or Ser
  VARIANT 977: note = Xaa is Gln or Ser
  VARIANT 978: note = Xaa is Tyr or Val
  VARIANT 980: note = Xaa is Gln or Ser
  VARIANT 985: note = Xaa is Gln or Ser
  VARIANT 986: note = Xaa is Tyr or Val
  VARIANT 988: note = Xaa is Gln or Ser
  VARIANT 993: note = Xaa is Gln or Ser
  VARIANT 994: note = Xaa is Tyr or Val
  VARIANT 996: note = Xaa is Gln or Ser
  VARIANT 1001: note = Xaa is Gln or Ser
  VARIANT 1002: note = Xaa is Tyr or Val
  VARIANT 1004: note = Xaa is Gln or Ser
  VARIANT 1009: note = Xaa is Gln or Ser
  VARIANT 1010: note = Xaa is Tyr or Val
  VARIANT 1012: note = Xaa is Gln or Ser
  VARIANT 1017: note = Xaa is Gln or Ser
  VARIANT 1018: note = Xaa is Tyr or Val
  VARIANT 1020: note = Xaa is Gln or Ser
  VARIANT 1025: note = Xaa is Gln or Ser
  VARIANT 1026: note = Xaa is Tyr or Val
  VARIANT 1028: note = Xaa is Gln or Ser
  VARIANT 1033: note = Xaa is Gln or Ser
  VARIANT 1034: note = Xaa is Tyr or Val
  VARIANT 1036: note = Xaa is Gln or Ser
  VARIANT 1041: note = Xaa is Gln or Ser
  VARIANT 1042: note = Xaa is Tyr or Val
  VARIANT 1044: note = Xaa is Gln or Ser
  VARIANT 1049: note = Xaa is Gln or Ser
  VARIANT 1050: note = Xaa is Tyr or Val
  VARIANT 1052: note = Xaa is Gln or Ser
  VARIANT 1057: note = Xaa is Gln or Ser
  VARIANT 1058: note = Xaa is Tyr or Val
  VARIANT 1060: note = Xaa is Gln or Ser
  VARIANT 1065: note = Xaa is Gln or Ser
  VARIANT 1066: note = Xaa is Tyr or Val
  VARIANT 1068: note = Xaa is Gln or Ser
  VARIANT 1073: note = Xaa is Gln or Ser
  VARIANT 1074: note = Xaa is Tyr or Val
  VARIANT 1076: note = Xaa is Gln or Ser
  VARIANT 1081: note = Xaa is Gln or Ser
  VARIANT 1082: note = Xaa is Tyr or Val
  VARIANT 1084: note = Xaa is Gln or Ser
  VARIANT 1089: note = Xaa is Gln or Ser
  VARIANT 1090: note = Xaa is Tyr or Val
  VARIANT 1092: note = Xaa is Gln or Ser
  VARIANT 1097: note = Xaa is Gln or Ser
  VARIANT 1098: note = Xaa is Tyr or Val
  VARIANT 1100: note = Xaa is Gln or Ser
  VARIANT 1105: note = Xaa is Gln or Ser
  VARIANT 1106: note = Xaa is Tyr or Val
  VARIANT 1108: note = Xaa is Gln or Ser
  VARIANT 1113: note = Xaa is Gln or Ser
  VARIANT 1114: note = Xaa is Tyr or Val
  VARIANT 1116: note = Xaa is Gln or Ser
  VARIANT 1121: note = Xaa is Gln or Ser
  VARIANT 1122: note = Xaa is Tyr or Val
  VARIANT 1124: note = Xaa is Gln or Ser
  VARIANT 1129: note = Xaa is Gln or Ser
  VARIANT 1130: note = Xaa is Tyr or Val
  VARIANT 1132: note = Xaa is Gln or Ser
  VARIANT 1137: note = Xaa is Gln or Ser
  VARIANT 1138: note = Xaa is Tyr or Val
  VARIANT 1140: note = Xaa is Gln or Ser
  VARIANT 1145: note = Xaa is Gln or Ser
  VARIANT 1146: note = Xaa is Tyr or Val
  VARIANT 1148: note = Xaa is Gln or Ser
  VARIANT 1153: note = Xaa is Gln or Ser
  VARIANT 1154: note = Xaa is Tyr or Val
  VARIANT 1156: note = Xaa is Gln or Ser
  VARIANT 1161: note = Xaa is Gln or Ser
  VARIANT 1162: note = Xaa is Tyr or Val
  VARIANT 1164: note = Xaa is Gln or Ser
  VARIANT 1169: note = Xaa is Gln or Ser
  VARIANT 1170: note = Xaa is Tyr or Val
  VARIANT 1172: note = Xaa is Gln or Ser
  VARIANT 1177: note = Xaa is Gln or Ser
  VARIANT 1178: note = Xaa is Tyr or Val
  VARIANT 1180: note = Xaa is Gln or Ser
  VARIANT 1185: note = Xaa is Gln or Ser
  VARIANT 1186: note = Xaa is Tyr or Val
  VARIANT 1188: note = Xaa is Gln or Ser
  VARIANT 1193: note = Xaa is Gln or Ser
  VARIANT 1194: note = Xaa is Tyr or Val
  VARIANT 1196: note = Xaa is Gln or Ser
  VARIANT 1201: note = Xaa is Gln or Ser
  VARIANT 1202: note = Xaa is Tyr or Val
  VARIANT 1204: note = Xaa is Gln or Ser
  VARIANT 1209: note = Xaa is Gln or Ser
  VARIANT 1210: note = Xaa is Tyr or Val
  VARIANT 1212: note = Xaa is Gln or Ser
  VARIANT 1217: note = Xaa is Gln or Ser
  VARIANT 1218: note = Xaa is Tyr or Val
  VARIANT 1220: note = Xaa is Gln or Ser
  VARIANT 1225: note = Xaa is Gln or Ser
  VARIANT 1226: note = Xaa is Tyr or Val
  VARIANT 1228: note = Xaa is Gln or Ser
  VARIANT 1233: note = Xaa is Gln or Ser
  VARIANT 1234: note = Xaa is Tyr or Val
  VARIANT 1236: note = Xaa is Gln or Ser
  VARIANT 1241: note = Xaa is Gln or Ser
  VARIANT 1242: note = Xaa is Tyr or Val
  VARIANT 1244: note = Xaa is Gln or Ser
  VARIANT 1249: note = Xaa is Gln or Ser
  VARIANT 1250: note = Xaa is Tyr or Val
  VARIANT 1252: note = Xaa is Gln or Ser
  VARIANT 1257: note = Xaa is Gln or Ser
  VARIANT 1258: note = Xaa is Tyr or Val
  VARIANT 1260: note = Xaa is Gln or Ser
  VARIANT 1265: note = Xaa is Gln or Ser
  VARIANT 1266: note = Xaa is Tyr or Val
  VARIANT 1268: note = Xaa is Gln or Ser
  VARIANT 1273: note = Xaa is Gln or Ser
  VARIANT 1274: note = Xaa is Tyr or Val
  VARIANT 1276: note = Xaa is Gln or Ser
XXPXDGRGXXPXDGRGXXPXDGRGXXPXDGRGXXPXDGRGXXPXDGRGXXPXDGRGXXPXDGRGXXPXDGRGXXPXDGRGXXPXDGRGXXPXDGRGXXPXDGRGXXPXDGRGXXPXDGRGXXPXDGRGXXPXDGRGXXPXDGRGXXPXDGRGXXPXDGRGXXPXDGRGXXPXDGRGXXPXDGRGXXPXDGRGXXPXDGRGXXPXDGRGXXPXDGRGXXPXDGRGXXPXDGRGXXPXDGRGXXPXDGRGXXPXDGRGXXPXDGRGXXPXDGRGXXPXDGRGXXPXDGRGXXPXDGRGXXPXDGRGXXPXDGRGXXPXDGRGXXPXDGRGXXPXDGRGXXPXDGRGXXPXDGRGXXPXDGRGXXPXDGRGXXPXDGRGXXPXDGRGXXPXDGRGXXPXDGRGXXPXDGRGXXPXDGRGXXPXDGRGXXPXDGRGXXPXDGRGXXPXDGRGXXPXDGRGXXPXDGRGXXPXDGRGXXPXDGRGXXPXDGRGXXPXDGRGXXPXDGRGXXPXDGRGXXPXDGRGXXPXDGRGXXPXDGRGXXPXDGRGXXPXDGRGXXPXDGRGXXPXDGRGXXPXDGRGXXPXDGRGXXPXDGRGXXPXDGRGXXPXDGRGXXPXDGRGXXPXDGRGXXPXDGRGXXPXDGRGXXPXDGRGXXPXDGRGXXPXDGRGXXPXDGRGXXPXDGRGXXPXDGRGXXPXDGRGXXPXDGRGXXPXDGRGXXPXDGRGXXPXDGRGXXPXDGRGXXPXDGRGXXPXDGRGXXPXDGRGXXPXDGRGXXPXDGRGXXPXDGRGXXPXDGRGXXPXDGRGXXPXDGRGXXPXDGRGXXPXDGRGXXPXDGRGXXPXDGRGXXPXDGRGXXPXDGRGXXPXDGRGXXPXDGRGXXPXDGRGXXPXDGRGXXPXDGRGXXPXDGRGXXPXDGRGXXPXDGRGXXPXDGRGXXPXDGRGXXPXDGRGXXPXDGRGXXPXDGRGXXPXDGRGXXPXDGRGXXPXDGRGXXPXDGRGXXPXDGRGXXPXDGRGXXPXDGRGXXPXDGRGXXPXDGRGXXPXDGRGXXPXDGRGXXPXDGRGXXPXDGRGXXPXDGRGXXPXDGRGXXPXDGRGXXPXDGRGXXPXDGRGXXPXDGRGXXPXDGRGXXPXDGRGXXPXDGRGXXPXDGRGXXPXDGRGXXPXDGRGXXPXDGRGXXPXDGRGXXPXDGRGXXPXDGRGXXPXDGRGXXPXDGRGXXPXDGRGXXPXDGRGXXPXDGRGXXPXDGRGXXPXDGRGXXPXDGRGXXPXDGRGXXPXDGRGXXPXDGRG

SEQ ID NO: 154 - protein, 320 aa, synthetic construct
  REGION 1..320: note = Elastin-like polypeptide
GRGDQPYQGRGDQPYQGRGDQPYQGRGDQPYQGRGDQPYQGRGDQPYQGRGDQPYQGRGDQPYQGRGDQPYQGRGDQPYQGRGDQPYQGRGDQPYQGRGDQPYQGRGDQPYQGRGDQPYQGRGDQPYQGRGDQPYQGRGDQPYQGRGDQPYQGRGDQPYQGRGDQPYQGRGDQPYQGRGDQPYQGRGDQPYQGRGDQPYQGRGDQPYQGRGDQPYQGRGDQPYQGRGDQPYQGRGDQPYQGRGDQPYQGRGDQPYQGRGDQPYQGRGDQPYQGRGDQPYQGRGDQPYQGRGDQPYQGRGDQPYQGRGDQPYQGRGDQPYQ

SEQ ID NO: 155 - protein, 400 aa, synthetic construct
  REGION 1..400: note = Elastin-like polypeptide
GVGVPGVGVPGVGVPGVGVPGVGVPGVGVPGVGVPGVGVPGVGVPGVGVPGVGVPGVGVPGVGVPGVGVPGVGVPGVGVPGVGVPGVGVPGVGVPGVGVPGVGVPGVGVPGVGVPGVGVPGVGVPGVGVPGVGVPGVGVPGVGVPGVGVPGVGVPGVGVPGVGVPGVGVPGVGVPGVGVPGVGVPGVGVPGVGVPGVGVPGVGVPGVGVPGVGVPGVGVPGVGVPGVGVPGVGVPGVGVPGVGVPGVGVPGVGVPGVGVPGVGVPGVGVPGVGVPGVGVPGVGVPGVGVPGVGVPGVGVPGVGVPGVGVPGVGVPGVGVPGVGVPGVGVPGVGVPGVGVPGVGVPGVGVPGVGVPGVGVPGVGVPGVGVPGVGVPGVGVPGVGVPGVGVPGVGVPGVGVP

SEQ ID NO: 156 - protein, 720 aa, synthetic construct
  REGION 1..720: note = Elastin-like polypeptide
GRGDQPYQGRGDQPYQGRGDQPYQGRGDQPYQGRGDQPYQGRGDQPYQGRGDQPYQGRGDQPYQGRGDQPYQGRGDQPYQGRGDQPYQGRGDQPYQGRGDQPYQGRGDQPYQGRGDQPYQGRGDQPYQGRGDQPYQGRGDQPYQGRGDQPYQGRGDQPYQGRGDQPYQGRGDQPYQGRGDQPYQGRGDQPYQGRGDQPYQGRGDQPYQGRGDQPYQGRGDQPYQGRGDQPYQGRGDQPYQGRGDQPYQGRGDQPYQGRGDQPYQGRGDQPYQGRGDQPYQGRGDQPYQGRGDQPYQGRGDQPYQGRGDQPYQGRGDQPYQGVGVPGVGVPGVGVPGVGVPGVGVPGVGVPGVGVPGVGVPGVGVPGVGVPGVGVPGVGVPGVGVPGVGVPGVGVPGVGVPGVGVPGVGVPGVGVPGVGVPGVGVPGVGVPGVGVPGVGVPGVGVPGVGVPGVGVPGVGVPGVGVPGVGVPGVGVPGVGVPGVGVPGVGVPGVGVPGVGVPGVGVPGVGVPGVGVPGVGVPGVGVPGVGVPGVGVPGVGVPGVGVPGVGVPGVGVPGVGVPGVGVPGVGVPGVGVPGVGVPGVGVPGVGVPGVGVPGVGVPGVGVPGVGVPGVGVPGVGVPGVGVPGVGVPGVGVPGVGVPGVGVPGVGVPGVGVPGVGVPGVGVPGVGVPGVGVPGVGVPGVGVPGVGVPGVGVPGVGVPGVGVPGVGVPGVGVPGVGVP

SEQ ID NO: 157 - protein, 12 aa, synthetic construct
  REGION 1..12: note = linker
GKSSGSGSESKS

SEQ ID NO: 158 - protein, 14 aa, synthetic construct
  REGION 1..14: note = linker
GSTSGSGKSSEGKG

SEQ ID NO: 159 - protein, 18 aa, synthetic construct
  REGION 1..18: note = linker
GSTSGSGKSSEGSGSTKG

SEQ ID NO: 160 - protein, 18 aa, synthetic construct
  REGION 1..18: note = linker
GSTSGSGKPGSGEGSTKG

SEQ ID NO: 161 - protein, 14 aa, synthetic construct
  REGION 1..14: note = linker
EGKSSGSGSESKEF

SEQ ID NO: 162 - protein, 5 aa, synthetic construct
  REGION 1..5: note = linker
SRSSG

SEQ ID NO: 163 - protein, 5 aa, synthetic construct
  REGION 1..5: note = linker
SGSSC

SEQ ID NO: 164 - protein, 18 aa, synthetic construct
  REGION 1..18: note = linker
EGRGSLLTCGDVEENPGP

SEQ ID NO: 165 - protein, 19 aa, synthetic construct
  REGION 1..19: note = linker
ATNFSLLKQAGDVEENPGP

SEQ ID NO: 166 - protein, 20 aa, synthetic construct
  REGION 1..20: note = linker
QCTNYALLKLAGDVESNPGP

SEQ ID NO: 167 - protein, 22 aa, synthetic construct
  REGION 1..22: note = linker
VKQTLNFDLLKLAGDVESNPGP

SEQ ID NO: 168 - skipped

SEQ ID NO: 169 - protein, 96 aa, Homo sapiens
NRPPIAIVSPQFQEISLPTTSTVIDGSQSTDDDKIVQYHWEELKGPLREEKISEDTAILKLSKLVPGNYTFSLTVVDSDGATNSTTANLTVNKAVD

SEQ ID NO: 170 - protein, 400 aa, synthetic construct
  REGION 1..400: note = Elastin-like polypeptide
GVGVPGLGVPGVGVPGLGVPGVGVPGVGVPGLGVPGVGVPGLGVPGVGVPGVGVPGLGVPGVGVPGLGVPGVGVPGVGVPGLGVPGVGVPGLGVPGVGVPGVGVPGLGVPGVGVPGLGVPGVGVPGVGVPGLGVPGVGVPGLGVPGVGVPGVGVPGLGVPGVGVPGLGVPGVGVPGVGVPGLGVPGVGVPGLGVPGVGVPGVGVPGLGVPGVGVPGLGVPGVGVPGVGVPGLGVPGVGVPGLGVPGVGVPGVGVPGLGVPGVGVPGLGVPGVGVPGVGVPGLGVPGVGVPGLGVPGVGVPGVGVPGLGVPGVGVPGLGVPGVGVPGVGVPGLGVPGVGVPGLGVPGVGVPGVGVPGLGVPGVGVPGLGVPGVGVPGVGVPGLGVPGVGVPGLGVPGVGVP

SEQ ID NO: 171 - protein, 505 aa, synthetic construct
  REGION 1..505: note = Purification Matrix
MSKGPGVGVPGLGVPGVGVPGLGVPGVGVPGVGVPGLGVPGVGVPGLGVPGVGVPGVGVPGLGVPGVGVPGLGVPGVGVPGVGVPGLGVPGVGVPGLGVPGVGVPGVGVPGLGVPGVGVPGLGVPGVGVPGVGVPGLGVPGVGVPGLGVPGVGVPGVGVPGLGVPGVGVPGLGVPGVGVPGVGVPGLGVPGVGVPGLGVPGVGVPGVGVPGLGVPGVGVPGLGVPGVGVPGVGVPGLGVPGVGVPGLGVPGVGVPGVGVPGLGVPGVGVPGLGVPGVGVPGVGVPGLGVPGVGVPGLGVPGVGVPGVGVPGLGVPGVGVPGLGVPGVGVPGVGVPGLGVPGVGVPGLGVPGVGVPGVGVPGLGVPGVGVPGLGVPGVGVPGVGVPGLGVPGVGVPGLGVPGVGVPGNRPPIAIVSPQFQEISLPTTSTVIDGSQSTDDDKIVQYHWEELKGPLREEKISEDTAILKLSKLVPGNYTFSLTVVDSDGATNSTTANLTVNKAVDYPG

SEQ ID NO: 172 - protein, 505 aa, synthetic construct
  REGION 1..505: note = Purification Matrix
MSKGPGVGVPGVGVPGVGVPGVGVPGVGVPGVGVPGVGVPGVGVPGVGVPGVGVPGVGVPGVGVPGVGVPGVGVPGVGVPGVGVPGVGVPGVGVPGVGVPGVGVPGVGVPGVGVPGVGVPGVGVPGVGVPGVGVPGVGVPGVGVPGVGVPGVGVPGVGVPGVGVPGVGVPGVGVPGVGVPGVGVPGVGVPGVGVPGVGVPGVGVPGVGVPGVGVPGVGVPGVGVPGVGVPGVGVPGVGVPGVGVPGVGVPGVGVPGVGVPGVGVPGVGVPGVGVPGVGVPGVGVPGVGVPGVGVPGVGVPGVGVPGVGVPGVGVPGVGVPGVGVPGVGVPGVGVPGVGVPGVGVPGVGVPGVGVPGVGVPGVGVPGVGVPGVGVPGVGVPGVGVPGVGVPGVGVPGVGVPGVGVPGNRPPIAIVSPQFQEISLPTTSTVIDGSQSTDDDKIVQYHWEELKGPLREEKISEDTAILKLSKLVPGNYTFSLTVVDSDGATNSTTANLTVNKAVDYPG

SEQ ID NO: 173 - protein, 505 aa, synthetic construct
  REGION 1..505: note = Purification Matrix
MSKGPGVGVPGVGVPGAGVPGVGVPGVGVPGVGVPGVGVPGAGVPGVGVPGVGVPGVGVPGVGVPGAGVPGVGVPGVGVPGVGVPGVGVPGAGVPGVGVPGVGVPGVGVPGVGVPGAGVPGVGVPGVGVPGVGVPGVGVPGAGVPGVGVPGVGVPGVGVPGVGVPGAGVPGVGVPGVGVPGVGVPGVGVPGAGVPGVGVPGVGVPGVGVPGVGVPGAGVPGVGVPGVGVPGVGVPGVGVPGAGVPGVGVPGVGVPGVGVPGVGVPGAGVPGVGVPGVGVPGVGVPGVGVPGAGVPGVGVPGVGVPGVGVPGVGVPGAGVPGVGVPGVGVPGVGVPGVGVPGAGVPGVGVPGVGVPGVGVPGVGVPGAGVPGVGVPGVGVPGVGVPGVGVPGAGVPGVGVPGVGVPGNRPPIAIVSPQFQEISLPTTSTVIDGSQSTDDDKIVQYHWEELKGPLREEKISEDTAILKLSKLVPGNYTFSLTVVDSDGATNSTTANLTVNKAVDYPG

SEQ ID NO: 174 - protein, 501 aa, synthetic construct
  REGION 1..501: note = Purification Matrix
MGVGVPGLGVPGVGVPGLGVPGVGVPGVGVPGLGVPGVGVPGLGVPGVGVPGVGVPGLGVPGVGVPGLGVPGVGVPGVGVPGLGVPGVGVPGLGVPGVGVPGVGVPGLGVPGVGVPGLGVPGVGVPGVGVPGLGVPGVGVPGLGVPGVGVPGVGVPGLGVPGVGVPGLGVPGVGVPGVGVPGLGVPGVGVPGLGVPGVGVPGVGVPGLGVPGVGVPGLGVPGVGVPGVGVPGLGVPGVGVPGLGVPGVGVPGVGVPGLGVPGVGVPGLGVPGVGVPGVGVPGLGVPGVGVPGLGVPGVGVPGVGVPGLGVPGVGVPGLGVPGVGVPGVGVPGLGVPGVGVPGLGVPGVGVPGVGVPGLGVPGVGVPGLGVPGVGVPGVGVPGLGVPGVGVPGLGVPGVGVPGNRPPIAIVSPQFQEISLPTTSTVIDGSQSTDDDKIVQYHWEELKGPLREEKISEDTAILKLSKLVPGNYTFSLTVVDSDGATNSTTANLTVNKAVDYPG

SEQ ID NO: 175 - protein, 1800 aa, synthetic construct
  REGION 1..1800: note = elastin-like polypeptide
  VARIANT 6..1800: note = May be present or absent in groups of the repeat unit Val Pro Gly Xaa Gly
  VARIANT 4: note = Xaa can be any naturally occurring amino acid except proline
  VARIANT 9: note = Xaa can be any naturally occurring amino acid except proline
  VARIANT 14: note = Xaa can be any naturally occurring amino acid except proline
  VARIANT 19: note = Xaa can be any naturally occurring amino acid except proline
  VARIANT 24: note = Xaa can be any naturally occurring amino acid except proline
  VARIANT 29: note = Xaa can be any naturally occurring amino acid except proline
  VARIANT 34: note = Xaa can be any naturally occurring amino acid except proline
  VARIANT 39: note = Xaa can be any naturally occurring amino acid except proline
  VARIANT 44: note = Xaa can be any naturally occurring amino acid except proline
  VARIANT 49: note = Xaa can be any naturally occurring amino acid except proline
  VARIANT 54: note = Xaa can be any naturally occurring amino acid except proline
  VARIANT 59: note = Xaa can be any naturally occurring amino acid except proline
  VARIANT 64: note = Xaa can be any naturally occurring amino acid except proline
  VARIANT 69: note = Xaa can be any naturally occurring amino acid except proline
  VARIANT 74: note = Xaa can be any naturally occurring amino acid except proline
  VARIANT 79: note = Xaa can be any naturally occurring amino acid except proline
  VARIANT 84: note = Xaa can be any naturally occurring amino acid except proline
  VARIANT 89: note = Xaa can be any naturally occurring amino acid except proline
  VARIANT 94: note = Xaa can be any naturally occurring amino acid except proline
  VARIANT 99: note = Xaa can be any naturally occurring amino acid except proline
  VARIANT 104: note = Xaa can be any naturally occurring amino acid except proline
  VARIANT 109: note = Xaa can be any naturally occurring amino acid except proline
  VARIANT 114: note = Xaa can be any naturally occurring amino acid except proline
  VARIANT 119: note = Xaa can be any naturally occurring amino acid except proline
  VARIANT 124: note = Xaa can be any naturally occurring amino acid except proline
  VARIANT 129: note = Xaa can be any naturally occurring amino acid except proline
  VARIANT 134: note = Xaa can be any naturally occurring amino acid except proline
  VARIANT 139: note = Xaa can be any naturally occurring amino acid except proline
  VARIANT 144: note = Xaa can be any naturally occurring amino acid except proline
  VARIANT 149: note = Xaa can be any naturally occurring amino acid except proline
  VARIANT 154: note = Xaa can be any naturally occurring amino acid except proline
  VARIANT 159: note = Xaa can be any naturally occurring amino acid except proline
  VARIANT 164: note = Xaa can be any naturally occurring amino acid except proline
  VARIANT 169: note = Xaa can be any naturally occurring amino acid except proline
  VARIANT 174: note = Xaa can be any naturally occurring amino acid except proline
  VARIANT 179: note = Xaa can be any naturally occurring amino acid except proline
  VARIANT 184: note = Xaa can be any naturally occurring amino acid except proline
  VARIANT 189: note = Xaa can be any naturally occurring amino acid except proline
  VARIANT 194: note = Xaa can be any naturally occurring amino acid except proline
  VARIANT 199: note = Xaa can be any naturally occurring amino acid except proline
  VARIANT 204: note = Xaa can be any naturally occurring amino acid except proline
  VARIANT 209: note = Xaa can be any naturally occurring amino acid except proline
  VARIANT 214: note = Xaa can be any naturally occurring amino acid except proline
  VARIANT 219: note = Xaa can be any naturally occurring amino acid except proline
  VARIANT 224: note = Xaa can be any naturally occurring amino acid except proline
  VARIANT 229: note = Xaa can be any naturally occurring amino acid except proline
  VARIANT 234: note = Xaa can be any naturally occurring amino acid except proline
  VARIANT 239: note = Xaa can be any naturally occurring amino acid except proline
  VARIANT 244: note = Xaa can be any naturally occurring amino acid except proline
  VARIANT 249: note = Xaa can be any naturally occurring amino acid except proline
  VARIANT 254: note = Xaa can be any naturally occurring amino acid except proline
  VARIANT 259: note = Xaa can be any naturally occurring amino acid except proline
  VARIANT 264: note = Xaa can be any naturally occurring amino acid except proline
  VARIANT 269: note = Xaa can be any naturally occurring amino acid except proline
  VARIANT 274: note = Xaa can be any naturally occurring amino acid except proline
  VARIANT 279: note = Xaa can be any naturally occurring amino acid except proline
  VARIANT 284: note = Xaa can be any naturally occurring amino acid except proline
  VARIANT 289: note = Xaa can be any naturally occurring amino acid except proline
  VARIANT 294: note = Xaa can be any naturally occurring amino acid except proline
  VARIANT 299: note = Xaa can be any naturally occurring amino acid except proline
  VARIANT 304: note = Xaa can be any naturally occurring amino acid except proline
  VARIANT 309: note = Xaa can be any naturally occurring amino acid except proline
  VARIANT 314: note = Xaa can be any naturally occurring amino acid except proline
  VARIANT 319: note = Xaa can be any naturally occurring amino acid except proline
  VARIANT 324: note = Xaa can be any naturally occurring amino acid except proline
  VARIANT 329: note = Xaa can be any naturally occurring amino acid except proline
  VARIANT 334: note = Xaa can be any naturally occurring amino acid except proline
  VARIANT 339: note = Xaa can be any naturally occurring amino acid except proline
  VARIANT 344: note = Xaa can be any naturally occurring amino acid except proline
  VARIANT 349: note = Xaa can be any naturally occurring amino acid except proline
  VARIANT 354: note = Xaa can be any naturally occurring amino acid except proline
  VARIANT 359: note = Xaa can be any naturally occurring amino acid except proline
  VARIANT 364: note = Xaa can be any naturally occurring amino acid except proline
  VARIANT 369: note = Xaa can be any naturally occurring amino acid except proline
  VARIANT 374: note = Xaa can be any naturally occurring amino acid except proline
  VARIANT 379: note = Xaa can be any naturally occurring amino acid except proline
  VARIANT 384: note = Xaa can be any naturally occurring amino acid except proline
  VARIANT 389: note = Xaa can be any naturally occurring amino acid except proline
  VARIANT 394: note = Xaa can be any naturally occurring amino acid except proline
  VARIANT 399: note = Xaa can be any naturally occurring amino acid except proline
  VARIANT 404: note = Xaa can be any naturally occurring amino acid except proline
  VARIANT 409: note = Xaa can be any naturally occurring amino acid except proline
  VARIANT 414: note = Xaa can be any naturally occurring amino acid except proline
  VARIANT 419: note = Xaa can be any naturally occurring amino acid except proline
  VARIANT 424: note = Xaa can be any naturally occurring amino acid except proline
  VARIANT 429: note = Xaa can be any naturally occurring amino acid except proline
  VARIANT 434: note = Xaa can be any naturally occurring amino acid except proline
  VARIANT 439: note = Xaa can be any naturally occurring amino acid except proline
  VARIANT 444: note = Xaa can be any naturally occurring amino acid except proline
  VARIANT 449: note = Xaa can be any naturally occurring amino acid except proline
  VARIANT 454: note = Xaa can be any naturally occurring amino acid except proline
  VARIANT 459: note = Xaa can be any naturally occurring amino acid except proline
  VARIANT 464: note = Xaa can be any naturally occurring amino acid except proline
  VARIANT 469: note = Xaa can be any naturally occurring amino acid except proline
  VARIANT 474: note = Xaa can be any naturally occurring amino acid except proline
  VARIANT 479: note = Xaa can be any naturally occurring amino acid except proline
  VARIANT 484: note = Xaa can be any naturally occurring amino acid except proline
  VARIANT 489: note = Xaa can be any naturally occurring amino acid except proline
  VARIANT 494: note = Xaa can be any naturally occurring amino acid except proline
  VARIANT 499: note = Xaa can be any naturally occurring amino acid except proline
  VARIANT 504: note = Xaa can be any naturally occurring amino acid except proline
  VARIANT 509: note = Xaa can be any naturally occurring amino acid except proline
  VARIANT 514: note = Xaa can be any naturally occurring amino acid except proline
  VARIANT 519: note = Xaa can be any naturally occurring amino acid except proline
  VARIANT 524: note = Xaa can be any naturally occurring amino acid except proline
  VARIANT 529: note = Xaa can be any naturally occurring amino acid except proline
  VARIANT 534: note = Xaa can be any naturally occurring amino acid except proline
  VARIANT 539: note = Xaa can be any naturally occurring amino acid except proline
  VARIANT 544: note = Xaa can be any naturally occurring amino acid except proline
  VARIANT 549: note = Xaa can be any naturally occurring amino acid except proline
  VARIANT 554: note = Xaa can be any naturally occurring amino acid except proline
  VARIANT 559: note = Xaa can be any naturally occurring amino acid except proline
  VARIANT 564: note = Xaa can be any naturally occurring amino acid except proline
  VARIANT 569: note = Xaa can be any naturally occurring amino acid except proline
  VARIANT 574: note = Xaa can be any naturally occurring amino acid except proline
  VARIANT 579: note = Xaa can be any naturally occurring amino acid except proline
  VARIANT 584: note = Xaa can be any naturally occurring amino acid except proline
  VARIANT 589: note = Xaa can be any naturally occurring amino acid except proline
  VARIANT 594: note = Xaa can be any naturally occurring amino acid except proline
  VARIANT 599: note = Xaa can be any naturally occurring amino acid except proline
  VARIANT 604: note = Xaa can be any naturally occurring amino acid except proline
  VARIANT 609: note = Xaa can be any naturally occurring amino acid except proline
  VARIANT 614: note = Xaa can be any naturally occurring amino acid except proline
  VARIANT 619: note = Xaa can be any naturally occurring amino acid except proline
  VARIANT 624: note = Xaa can be any naturally occurring amino acid except proline
  VARIANT 629: note = Xaa can be any naturally occurring amino acid except proline
  VARIANT 634: note = Xaa can be any naturally occurring amino acid except proline
  VARIANT 639: note = Xaa can be any naturally occurring amino acid except proline
  VARIANT 644: note = Xaa can be any naturally occurring amino acid except proline
  VARIANT 649: note = Xaa can be any naturally occurring amino acid except proline
  VARIANT 654: note = Xaa can be any naturally occurring amino acid except proline
  VARIANT 659: note = Xaa can be any naturally occurring amino acid except proline
  VARIANT 664: note = Xaa can be any naturally occurring amino acid except proline
  VARIANT 669: note = Xaa can be any naturally occurring amino acid except proline
  VARIANT 674: note = Xaa can be any naturally occurring amino acid except proline
  VARIANT 679: note = Xaa can be any naturally occurring amino acid except proline
  VARIANT 684: note = Xaa can be any naturally occurring amino acid except proline
  VARIANT 689: note = Xaa can be any naturally occurring amino acid except proline
  VARIANT 694: note = Xaa can be any naturally occurring amino acid except proline
  VARIANT 699: note = Xaa can be any naturally occurring amino acid except proline
  VARIANT 704: note = Xaa can be any naturally occurring amino acid except proline
  VARIANT 709: note = Xaa can be any naturally occurring amino acid except proline
  VARIANT 714: note = Xaa can be any naturally occurring amino acid except proline
  VARIANT 719: note = Xaa can be any naturally occurring amino acid except proline
  VARIANT 724: note = Xaa can be any naturally occurring amino acid except proline
  VARIANT 729: note = Xaa can be any naturally occurring amino acid except proline
  VARIANT 734: note = Xaa can be any naturally occurring amino acid except proline
  VARIANT 739: note = Xaa can be any naturally occurring amino acid except proline
  VARIANT 744: note = Xaa can be any naturally occurring amino acid except proline
  VARIANT 749: note = Xaa can be any naturally occurring amino acid except proline
  VARIANT 754: note = Xaa can be any naturally occurring amino acid except proline
  VARIANT 759: note = Xaa can be any naturally occurring amino acid except proline
  VARIANT 764: note = Xaa can be any naturally occurring amino acid except proline
  VARIANT 769: note = Xaa can be any naturally occurring amino acid except proline
  VARIANT 774: note = Xaa can be any naturally occurring amino acid except proline
  VARIANT 779: note = Xaa can be any naturally occurring amino acid except proline
  VARIANT 784: note = Xaa can be any naturally occurring amino acid except proline
  VARIANT 789: note = Xaa can be any naturally occurring amino acid except proline
  VARIANT 794: note = Xaa can be any naturally occurring amino acid except proline
  VARIANT 799: note = Xaa can be any naturally occurring amino acid except proline
  VARIANT 804: note = Xaa can be any naturally occurring amino acid except proline
  VARIANT 809: note = Xaa can be any naturally occurring amino acid except proline
  VARIANT 814: note = Xaa can be any naturally occurring amino acid except proline
  VARIANT 819: note = Xaa can be any naturally occurring amino acid except proline
  VARIANT 824: note = Xaa can be any naturally occurring amino acid except proline
  VARIANT 829: note = Xaa can be any naturally occurring amino acid except proline
  VARIANT 834: note = Xaa can be any naturally occurring amino acid except proline
  VARIANT 839: note = Xaa can be any naturally occurring amino acid except proline
  VARIANT 844: note = Xaa can be any naturally occurring amino acid except proline
  VARIANT 849: note = Xaa can be any naturally occurring amino acid except proline
  VARIANT 854: note = Xaa can be any naturally occurring amino acid except proline
  VARIANT 859: note = Xaa can be any naturally occurring amino acid except proline
  VARIANT 864: note = Xaa can be any naturally occurring amino acid except proline
  VARIANT 869: note = Xaa can be any naturally occurring amino acid except proline
  VARIANT 874: note = Xaa can be any naturally occurring amino acid except proline
  VARIANT 879: note = Xaa can be any naturally occurring amino acid except proline
  VARIANT 884: note = Xaa can be any naturally occurring amino acid except proline
  VARIANT 889: note = Xaa can be any naturally occurring amino acid except proline
  VARIANT 894: note = Xaa can be any naturally occurring amino acid except proline
  VARIANT 899: note = Xaa can be any naturally occurring amino acid except proline
  VARIANT 904: note = Xaa can be any naturally occurring amino acid except proline
  VARIANT 909: note = Xaa can be any naturally occurring amino acid except proline
  VARIANT 914: note = Xaa can be any naturally occurring amino acid except proline
  VARIANT 919: note = Xaa can be any naturally occurring amino acid except proline
  VARIANT 924: note = Xaa can be any naturally occurring amino acid except proline
  VARIANT 929: note = Xaa can be any naturally occurring amino acid except proline
  VARIANT 934: note = Xaa can be any naturally occurring amino acid except proline
  VARIANT 939: note = Xaa can be any naturally occurring amino acid except proline
  VARIANT 944: note = Xaa can be any naturally occurring amino acid except proline
  VARIANT 949: note = Xaa can be any naturally occurring amino acid except proline
  VARIANT 954: note = Xaa can be any naturally occurring amino acid except proline
  VARIANT 959: note = Xaa can be any naturally occurring amino acid except proline
  VARIANT 964: note = Xaa can be any naturally occurring amino acid except proline
  VARIANT 969: note = Xaa can be any naturally occurring amino acid except proline
  VARIANT 974: note = Xaa can be any naturally occurring amino acid except proline
  VARIANT 979: note = Xaa can be any naturally occurring amino acid except proline
  VARIANT 984: note = Xaa can be any naturally occurring amino acid except proline
  VARIANT 989: note = Xaa can be any naturally occurring amino acid except proline
  VARIANT 994: note = Xaa can be any naturally occurring amino acid except proline
  VARIANT 999: note = Xaa can be any naturally occurring amino acid except proline
  VARIANT 1004: note = Xaa can be any naturally occurring amino acid except proline
  VARIANT 1009: note = Xaa can be any naturally occurring amino acid except proline
  VARIANT 1014: note = Xaa can be any naturally occurring amino acid except proline
  VARIANT 1019: note = Xaa can be any naturally occurring amino acid except proline
  VARIANT 1024: note = Xaa can be any naturally occurring amino acid except proline
  VARIANT 1029: note = Xaa can be any naturally occurring amino acid except proline
  VARIANT 1034: note = Xaa can be any naturally occurring amino acid except proline
  VARIANT 1039: note = Xaa can be any naturally occurring amino acid except proline
  VARIANT 1044: note = Xaa can be any naturally occurring amino acid except proline
  VARIANT 1049: note = Xaa can be any naturally occurring amino acid except proline
  VARIANT 1054: note = Xaa can be any naturally occurring amino acid except proline
  VARIANT 1059: note = Xaa can be any naturally occurring amino acid except proline
  VARIANT 1064: note = Xaa can be any naturally occurring amino acid except proline
  VARIANT 1069: note = Xaa can be any naturally occurring amino acid except proline
  VARIANT 1074: note = Xaa can be any naturally occurring amino acid except proline
  VARIANT 1079: note = Xaa can be any naturally occurring amino acid except proline
  VARIANT 1084: note = Xaa can be any naturally occurring amino acid except proline
  VARIANT 1089: note = Xaa can be any naturally occurring amino acid except proline
  VARIANT 1094: note = Xaa can be any naturally occurring amino acid except proline
  VARIANT 1099: note = Xaa can be any naturally occurring amino acid except proline
  VARIANT 1104: note = Xaa can be any naturally occurring amino acid except proline
  VARIANT 1109: note = Xaa can be any naturally occurring amino acid except proline
  VARIANT 1114: note = Xaa can be any naturally occurring amino acid except proline
  VARIANT 1119: note = Xaa can be any naturally occurring amino acid except proline
  VARIANT 1124: note = Xaa can be any naturally occurring amino acid except proline
  VARIANT 1129: note = Xaa can be any naturally occurring amino acid except proline
  VARIANT 1134: note = Xaa can be any naturally occurring amino acid except proline
  VARIANT 1139: note = Xaa can be any naturally occurring amino acid except proline
  VARIANT 1144: note = Xaa can be any naturally occurring amino acid except proline
  VARIANT 1149: note = Xaa can be any naturally occurring amino acid except proline
  VARIANT 1154: note = Xaa can be any naturally occurring amino acid except proline
  VARIANT 1159: note = Xaa can be any naturally occurring amino acid except proline
  VARIANT 1164: note = Xaa can be any naturally occurring amino acid except proline
  VARIANT 1169: note = Xaa can be any naturally occurring amino acid except proline
  VARIANT 1174: note = Xaa can be any naturally occurring amino acid except proline
  VARIANT 1179: note = Xaa can be any naturally occurring amino acid except proline
  VARIANT 1184: note = Xaa can be any naturally occurring amino acid except proline
  VARIANT 1189: note = Xaa can be any naturally occurring amino acid except proline
  VARIANT 1194: note = Xaa can be any naturally occurring amino acid except proline
  VARIANT 1199: note = Xaa can be any naturally occurring amino acid except proline
  VARIANT 1204: note = Xaa can be any naturally occurring amino acid except proline
  VARIANT 1209: note = Xaa can be any naturally occurring amino acid except proline
  VARIANT 1214: note = Xaa can be any naturally occurring amino acid except proline
  VARIANT 1219: note = Xaa can be any naturally occurring amino acid except proline
  VARIANT 1224: note = Xaa can be any naturally occurring amino acid except proline
  VARIANT 1229: note = Xaa can be any naturally occurring amino acid except proline
  VARIANT 1234: note = Xaa can be any naturally occurring amino acid except proline
  VARIANT 1239: note = Xaa can be any naturally occurring amino acid except proline
  VARIANT 1244: note = Xaa can be any naturally occurring amino acid except proline
  VARIANT 1249: note = Xaa can be any naturally occurring amino acid except proline
  VARIANT 1254: note = Xaa can be any naturally occurring amino acid except proline
  VARIANT 1259: note = Xaa can be any naturally occurring amino acid except proline
  VARIANT 1264: note = Xaa can be any naturally occurring amino acid except proline
  VARIANT 1269: note = Xaa can be any naturally occurring amino acid except proline
  VARIANT 1274: note = Xaa can be any naturally occurring amino acid except proline
  VARIANT 1279: note = Xaa can be any naturally occurring amino acid except proline
  VARIANT 1284: note = Xaa can be any naturally occurring amino acid except proline
  VARIANT 1289: note = Xaa can be any naturally occurring amino acid except proline
  VARIANT 1294: note = Xaa can be any naturally occurring amino acid except proline
  VARIANT 1299: note = Xaa can be any naturally occurring amino acid except proline
  VARIANT 1304: note = Xaa can be any naturally occurring amino acid except proline
  VARIANT 1309: note = Xaa can be any naturally occurring amino acid except proline
  VARIANT 1314: note = Xaa can be any naturally occurring amino acid except proline
  VARIANT 1319: note = Xaa can be any naturally occurring amino acid except proline
  VARIANT 1324: note = Xaa can be any naturally occurring amino acid except proline
  VARIANT 1329: note = Xaa can be any naturally occurring amino acid except proline
  VARIANT 1334: note = Xaa can be any naturally occurring amino acid except proline
  VARIANT 1339: note = Xaa can be any naturally occurring amino acid except proline
  VARIANT 1344: note = Xaa can be any naturally occurring amino acid except proline
  VARIANT 1349: note = Xaa can be any naturally occurring amino acid except proline
  VARIANT 1354: note = Xaa can be any naturally occurring amino acid except proline
  VARIANT 1359: note = Xaa can be any naturally occurring amino acid except proline
  VARIANT 1364: note = Xaa can be any naturally occurring amino acid except proline
  VARIANT 1369: note = Xaa can be any naturally occurring amino acid except proline
  VARIANT 1374: note = Xaa can be any naturally occurring amino acid except proline
  VARIANT 1379: note = Xaa can be any naturally occurring amino acid except proline
  VARIANT 1384: note = Xaa can be any naturally occurring amino acid except proline
  VARIANT 1389: note = Xaa can be any naturally occurring amino acid except proline
  VARIANT 1394: note = Xaa can be any naturally occurring amino acid except proline
  VARIANT 1399: note = Xaa can be any naturally occurring amino acid except proline
  VARIANT 1404: note = Xaa can be any naturally occurring amino acid except proline
  VARIANT 1409: note = Xaa can be any naturally occurring amino acid except proline
  VARIANT 1414: note = Xaa can be any naturally occurring amino acid except proline
  VARIANT 1419: note = Xaa can be any naturally occurring amino acid except proline
  VARIANT 1424: note = Xaa can be any naturally occurring amino acid except proline
  VARIANT 1429: note = Xaa can be any naturally occurring amino acid except proline
  VARIANT 1434: note = Xaa can be any naturally occurring amino acid except proline
  VARIANT 1439: note = Xaa can be any naturally occurring amino acid except proline
  VARIANT 1444: note = Xaa can be any naturally occurring amino acid except proline
  VARIANT 1449: note = Xaa can be any naturally occurring amino acid except proline
  VARIANT 1454: note = Xaa can be any naturally occurring amino acid except proline
  VARIANT 1459: note = Xaa can be any naturally occurring amino acid except proline
  VARIANT 1464: note = Xaa can be any naturally occurring amino acid except proline
  VARIANT 1469: note = Xaa can be any naturally occurring amino acid except proline
  VARIANT 1474: note = Xaa can be any naturally occurring amino acid except proline
  VARIANT 1479: note = Xaa can be any naturally occurring amino acid except proline
  VARIANT 1484: note = Xaa can be any naturally occurring amino acid except proline
  VARIANT 1489: note = Xaa can be any naturally occurring amino acid except proline
  VARIANT 1494: note = Xaa can be any naturally occurring amino acid except proline
  VARIANT 1499: note = Xaa can be any naturally occurring amino acid except proline
  VARIANT 1504: note = Xaa can be any naturally occurring amino acid except proline
  VARIANT 1509: note = Xaa can be any naturally occurring amino acid except proline
  VARIANT 1514: note = Xaa can be any naturally occurring amino acid except proline
  VARIANT 1519: note = Xaa can be any naturally occurring amino acid except proline
  VARIANT 1524: note = Xaa can be any naturally occurring amino acid except proline
  VARIANT 1529: note = Xaa can be any naturally occurring amino acid except proline
  VARIANT 1534: note = Xaa can be any naturally occurring amino acid except proline
  VARIANT 1539: note = Xaa can be any naturally occurring amino acid except proline
  VARIANT 1544: note = Xaa can be any naturally occurring amino acid except proline
  VARIANT 1549: note = Xaa can be any naturally occurring amino acid except proline
  VARIANT 1554: note = Xaa can be any naturally occurring amino acid except proline
  VARIANT 1559: note = Xaa can be any naturally occurring amino acid except proline
  VARIANT 1564: note = Xaa can be any naturally occurring amino acid except proline
  VARIANT 1569: note = Xaa can be any naturally occurring amino acid except proline
  VARIANT 1574: note = Xaa can be any naturally occurring amino acid except proline
  VARIANT 1579: note = Xaa can be any naturally occurring amino acid except proline
  VARIANT 1584: note = Xaa can be any naturally occurring amino acid except proline
  VARIANT 1589: note = Xaa can be any naturally occurring amino acid except proline
  VARIANT 1594: note = Xaa can be any naturally occurring amino acid except proline
  VARIANT 1599: note = Xaa can be any naturally occurring amino acid except proline
  VARIANT 1604: note = Xaa can be any naturally occurring amino acid except proline
  VARIANT 1609: note = Xaa can be any naturally occurring amino acid except proline
  VARIANT 1614: note = Xaa can be any naturally occurring amino acid except proline
  VARIANT 1619: note = Xaa can be any naturally occurring amino acid except proline
  VARIANT 1624: note = Xaa can be any naturally occurring amino acid except proline
  VARIANT 1629: note = Xaa can be any naturally occurring amino acid except proline
  VARIANT 1634: note = Xaa can be any naturally occurring amino acid except proline
  VARIANT 1639: note = Xaa can be any naturally occurring amino acid except proline
  VARIANT 1644: note = Xaa can be any naturally occurring amino acid except proline
  VARIANT 1649: note = Xaa can be any naturally occurring amino acid except proline
  VARIANT 1654: note = Xaa can be any naturally occurring amino acid except proline
  VARIANT 1659: note = Xaa can be any naturally occurring amino acid except proline
  VARIANT 1664: note = Xaa can be any naturally occurring amino acid except proline
  VARIANT 1669: note = Xaa can be any naturally occurring amino acid except proline
  VARIANT 1674: note = Xaa can be any naturally occurring amino acid except proline
  VARIANT 1679: note = Xaa can be any naturally occurring amino acid except proline
  VARIANT 1684: note = Xaa can be any naturally occurring amino acid except proline
  VARIANT 1689: note = Xaa can be any naturally occurring amino acid except proline
  VARIANT 1694: note = Xaa can be any naturally occurring amino acid except proline
  VARIANT 1699: note = Xaa can be any naturally occurring amino acid except proline
  VARIANT 1704: note = Xaa can be any naturally occurring amino acid except proline
  VARIANT 1709: note = Xaa can be any naturally occurring amino acid except proline
  VARIANT 1714: note = Xaa can be any naturally occurring amino acid except proline
  VARIANT 1719: note = Xaa can be any naturally occurring amino acid except proline
  VARIANT 1724: note = Xaa can be any naturally occurring amino acid except proline
  VARIANT 1729: note = Xaa can be any naturally occurring amino acid except proline
  VARIANT 1734: note = Xaa can be any naturally occurring amino acid except proline
  VARIANT 1739: note = Xaa can be any naturally occurring amino acid except proline
  VARIANT 1744: note = Xaa can be any naturally occurring amino acid except proline
  VARIANT 1749: note = Xaa can be any naturally occurring amino acid except proline
  VARIANT 1754: note = Xaa can be any naturally occurring amino acid except proline
  VARIANT 1759: note = Xaa can be any naturally occurring amino acid except proline
  VARIANT 1764: note = Xaa can be any naturally occurring amino acid except proline
  VARIANT 1769: note = Xaa can be any naturally occurring amino acid except proline
  VARIANT 1774: note = Xaa can be any naturally occurring amino acid except proline
  VARIANT 1779: note = Xaa can be any naturally occurring amino acid except proline
  VARIANT 1784: note = Xaa can be any naturally occurring amino acid except proline
  VARIANT 1789: note = Xaa can be any naturally occurring amino acid except proline
  VARIANT 1794: note = Xaa can be any naturally occurring amino acid except proline
  VARIANT 1799: note = Xaa can be any naturally occurring amino acid except proline
VPGXGVPGXGVPGXGVPGXGVPGXGVPGXGVPGXGVPGXGVPGXGVPGXGVPGXGVPGXGVPGXGVPGXGVPGXGVPGXGVPGXGVPGXGVPGXGVPGXGVPGXGVPGXGVPGXGVPGXGVPGXGVPGXGVPGXGVPGXGVPGXGVPGXGVPGXGVPGXGVPGXGVPGXGVPGXGVPGXGVPGXGVPGXGVPGXGVPGXGVPGXGVPGXGVPGXGVPGXGVPGXGVPGXGVPGXGVPGXGVPGXGVPGXGVPGXGVPGXGVPGXGVPGXGVPGXGVPGXGVPGXGVPGXGVPGXGVPGXGVPGXGVPGXGVPGXGVPGXGVPGXGVPGXGVPGXGVPGXGVPGXGVPGXGVPGXGVPGXGVPGXGVPGXGVPGXGVPGXGVPGXGVPGXGVPGXGVPGXGVPGXGVPGXGVPGXGVPGXGVPGXGVPGXGVPGXGVPGXGVPGXGVPGXGVPGXGVPGXGVPGXGVPGXGVPGXGVPGXGVPGXGVPGXGVPGXGVPGXGVPGXGVPGXGVPGXGVPGXGVPGXGVPGXGVPGXGVPGXGVPGXGVPGXGVPGXGVPGXGVPGXGVPGXGVPGXGVPGXGVPGXGVPGXGVPGXGVPGXGVPGXGVPGXGVPGXGVPGXGVPGXGVPGXGVPGXGVPGXGVPGXGVPGXGVPGXGVPGXGVPGXGVPGXGVPGXGVPGXGVPGXGVPGXGVPGXGVPGXGVPGXGVPGXGVPGXGVPGXGVPGXGVPGXGVPGXGVPGXGVPGXGVPGXGVPGXGVPGXGVPGXGVPGXGVPGXGVPGXGVPGXGVPGXGVPGXGVPGXGVPGXGVPGXGVPGXGVPGXGVPGXGVPGXGVPGXGVPGXGVPGXGVPGXGVPGXGVPGXGVPGXGVPGXGVPGXGVPGXGVPGXGVPGXGVPGXGVPGXGVPGXGVPGXGVPGXGVPGXGVPGXGVPGXGVPGXGVPGXGVPGXGVPGXGVPGXGVPGXGVPGXGVPGXGVPGXGVPGXGVPGXGVPGXGVPGXGVPGXGVPGXGVPGXGVPGXGVPGXGVPGXGVPGXGVPGXGVPGXGVPGXGVPGXGVPGXGVPGXGVPGXGVPGXGVPGXGVPGXGVPGXGVPGXGVPGXGVPGXGVPGXGVPGXGVPGXGVPGXGVPGXGVPGXGVPGXGVPGXGVPGXGVPGXGVPGXGVPGXGVPGXGVPGXGVPGXGVPGXGVPGXGVPGXGVPGXGVPGXGVPGXGVPGXGVPGXGVPGXGVPGXGVPGXGVPGXGVPGXGVPGXGVPGXGVPGXGVPGXGVPGXGVPGXGVPGXGVPGXGVPGXGVPGXGVPGXGVPGXGVPGXGVPGXGVPGXGVPGXGVPGXGVPGXGVPGXGVPGXGVPGXGVPGXGVPGXGVPGXGVPGXGVPGXGVPGXGVPGXGVPGXGVPGXGVPGXGVPGXGVPGXGVPGXGVPGXGVPGXGVPGXGVPGXGVPGXGVPGXGVPGXGVPGXGVPGXGVPGXGVPGXGVPGXGVPGXGVPGXGVPGXGVPGXGVPGXGVPGXGVPGXGVPGXGVPGXGVPGXGVPGXGVPGXGVPGXGVPGXGVPGXGVPGXGVPGXGVPGXGVPGXGVPGXGVPGXGVPGXGVPGXGVPGXGVPGXGVPGXGVPGXGVPGXGVPGXGVPGXGVPGXGVPGXGVPGXGVPGXGVPGXGVPGXGVPGXGVPGXGVPGXGVPGXGVPGXGVPGXGVPGXGVPGXGVPGXGVPGXGVPGXGVPGXGVPGXGVPGXGVPGXGVPGXGVPGXGVPGXGVPGXGVPGXGVPGXGVPGXGVPGXGVPGXGVPGXGVPGXGVPGXGVPGXGVPGXGVPGXG